(19) United States
(12) Patent Application Publication
(10) Pub. No.: US 2022/0411777 A1
(43) Pub. Date: Dec. 29, 2022

(54) C-to-G Transversion DNA Base Editors

(71) Applicant: The General Hospital Corporation, Boston, MA (US)

(72) Inventors: J. Keith Joung, Winchester, MA (US); Ibrahim Cagri Kurt, Chelsea, MA (US); Ronghao Zhou, Charlestown, MA (US); Julian Grunewald, Charlestown, MA (US)

(21) Appl. No.: 17/638,157

(22) PCT Filed: Aug. 31, 2020
(86) PCT No.: PCT/US2020/048777

§ 371 Date: Feb. 24, 2022

Related U.S. Application Data
(60) Provisional application No. 63/023,208, filed on May 11, 2020.
(60) Provisional application No. 62/916,654, filed on Oct. 17, 2019.
(60) Provisional application No. 62/910,912, filed on Oct. 4, 2019.
(60) Provisional application No. 62/894,628, filed on Aug. 30, 2019.

(51) Int. Cl. C12N 9/78; C12N 15/10

(52) U.S. Cl. CPC C12N 9/78; C12N 15/102; C12Y 305/04005

(57) ABSTRACT

Engineered transversion base editors that enable expanded amino acid modifications and methods of using the same. Described herein, for example, are fusion proteins containing cytidine deaminases (e.g. human or rat APOBECs, pmCDA1 or AID) or adenosine deaminases (e.g. E. coli TadAs) or a combination thereof, catalytically impaired CRISPR-Cas proteins (e.g. Cas9, CasX or Cas12 nucleases), linkers, nuclear localization signals (NLSs) and a human or E. coli uracil-n-glycosylase (UNG) and/or REV1 protein that enable the CRISPR-guided programmable introduction of C-to-G and G-to-C transversions in DNA. The UNG may be fused to the deaminase-Cas fusion or not, in which case endogenous UNG may be recruited using molecular machinery that is integrated into the deaminase-Cas fusion architecture, e.g. using peptide or RNA aptamers or scFVs, sdABs or Fabs.

### CLAIM OF PRIORITY

[0001] This application claims the benefit of U.S. Patent Application Ser. No. 62/894,628 filed on Aug. 30, 2019; 62/910,912 filed on Oct. 4, 2019; 62/916,654 filed on Oct. 17, 2019; and 63/023,208, filed on May 11, 2020. The entire contents of the foregoing are hereby incorporated by reference.

### FEDERALLY SPONSORED RESEARCH OR DEVELOPMENT

[0002] This invention was made with Government support under Grant No. HG009490 awarded by the National Institutes of Health and contract HR0011-17-2-0042 awarded by the Defense Advanced Research Projects Agency of the Department of Defense. The Government has certain rights in the invention.

### TECHNICAL FIELD

[0003] Described herein are fusion proteins containing cytidine deaminases (e.g. human or rat APOBECs, pmCDA1 or AID) or adenosine deaminases (e.g. E. coli TadAs) or a combination thereof, catalytically impaired CRISPR-Cas proteins (e.g. Cas9, CasX or Cas12 nucleases), linkers, nuclear localization signals (NLSs) and a human or E. coli uracil-n-glycosylase (UNG) and/or REV1 protein that enable the CRISPR-guided programmable introduction of C-to-G and G-to-C transversions in DNA. The UNG may be fused to the deaminase-Cas fusion or not, in which case endogenous UNG may be recruited using molecular machinery that is integrated into the deaminase-Cas fusion architecture, e.g. using peptide or RNA aptamers or scFVs, sdABs or Fabs.

### BACKGROUND

[0004] DNA base editors represent a new class of genome editing tools that enable the programmable installation of single or multiple base substitutions. Current generations of cytosine base editors (CBE) and adenine base editors (ABE) allow for the targeted deamination of cytosines and adenines that get exposed on ssDNA by RNA-guided CRISPR-Cas proteins¹⁻⁴. The majority of disease-associated genetic perturbations known to date are point mutations, also known as single nucleotide variants (SNVs). Current iterations of CBEs and ABEs can target disease-relevant transition mutations and revert them to the original genotype, e.g. correcting G-to-A (C-to-T) mutations using ABE. However, a relevant fraction of disease-associated SNVs represent C-to-G and G-to-C substitutions that cannot be targeted using current BEs.

### SUMMARY

[0005] Described herein are CRISPR-guided C-to-G transversion base editors (CGBE) that enable the installation of cytosine-to-guanine and guanine-to-cytosine base edits in the ssDNA bubble generated by RNA-guided fusion proteins that contain adenine (e.g. E. coli TadA) and/or cytosine (e.g. rat APOBEC1) deaminases as well as CRISPR-Cas proteins (e.g. S. pyogenes Cas9) and/or REV1 or UNG proteins that are directly fused and/or recruited to the deaminase-Cas fusion protein. CGBE comprises a programmable DNA-binding domain (e.g. catalytically impaired dead or nicking Cas9) fused to a cytosine and/or adenosine deaminase. The adenosine deaminase can be a wild type (WT) or mutant E. coli TadA or previously described engineered TadA variants in the form of monomers, homodimers or heterodimers thereof, to decrease RNA editing activity while still preserving DNA editing activity (SECURE or RRE variants, Grünewald et al, NBT 2019—in press). The cytidine deaminase can be, e.g. rat APOBEC1, A3A, AID or pmCDA1, or previously described engineered variants of these deaminases (e.g. rAPOBEC1 with mutations from SECURE-BE3) with reduced RNA editing activity and preserved DNA editing capabilities⁵⁻⁹. In some embodiments, CGBE comprises one or more uracil-N-glycosylases (UNGs) fused to the N and/or C-terminus of the CBE or ABE fusion protein without uracil-N-glycosylase inhibitors (UGIs) and potentially with fused REV1 proteins. In some embodiments, CGBE comprise a linker between the adenosine or cytidine deaminase and the programmable DNA binding domain as well as between the deaminase domain and the UNG or the DNA binding domain and the UNG. In some embodiments the TadA domain can be monomeric, homodimeric or heterodimeric and contain all combinations of wild type (WT) E. coli TadA, or mutant variants of TadA).

[0006] Thus, provided herein are C-to-G transversion base editors (CGBEs) comprising a cytidine deaminase, a programmable DNA binding domain, and further comprising one or more nuclear localization sequences (NLS), and optionally one or more human or E. coli or other uracil-n-glycosylases (UNGs) or SMUG1, preferably wherein the CGBE does not comprise a uracil-N-glycosylase inhibitors (UGI).

[0007] In some embodiments, the cytidine deaminase comprises an active cytidine deaminase domain, preferably a monomeric domain, from a wild type and/or engineered rat APOBEC1 (rAPOBEC1), human APOBEC3A, human APOBEC3G, human AID, pmCDA1 (e.g., shown in Tables A and B) or variations thereof bearing mutations that reduce RNA or DNA off-target editing while retaining efficient DNA base editing.

[0008] In some embodiments, the cytidine deaminase comprises one or more mutations corresponding to mutations in rAPOBEC1, human APOBEC3A, human APOBEC3G, human AID or pmCDA1 or in any homologue or orthologue thereof (optionally those in Tables A and B).

[0009] In some embodiments, the cytidine deaminase is a rAPOBEC1 or any one of its ortho- or paralogues listed in Tables A or B, comprises one or more mutations that decrease RNA editing activity while preserving DNA editing activity, wherein the mutations are at amino acid positions that correspond to residues R33, P29, K34, E181, and/or L182 of rAPOBEC1 (SEQ ID NO:67) or to W90Y, R126E, R132E, W90Y+R126E (double mutant), R126E+R132E (double mutant), W90Y+R132E (double mutant), W90Y+R126E+R132E (triple mutant) (see, e.g., Ref. 16).

[0010] In some embodiments, the one or more mutations comprises a mutation at amino acid position that correspond to: (1) residue R33 of WT rAPOBEC1 or evoAPOBEC1; or (2) residue R13 in evoFERNY-APOBEC1; or (3) residue R12 in FERNY-APOBEC1.

[0011] In some embodiments, the mutation at amino acid position that correspond to residue R33 is a R33A substitution mutation.

[0012] In some embodiments, the CGBE comprises N- or C-terminal fusions of one or more human or E. coli UNG or SMUG1 or other orthologues of UNG or SMUG1 (e.g. as shown in Table J).

[0013] In some embodiments, the one or more UNGs are E. coli UNGs.

[0014] In some embodiments, the UNG(s) is absent, e.g., to minimize indel formation and reduce the size/length of the editor (e.g. miniCGBE1).

[0015] In some embodiments, the cytidine deaminase is a wildtype or engineered rAPOBEC1 (or any one of its ortho- or paralogues listed in Tables A or B) and the cytidine deaminase bears one or more mutations at positions: P29F, P29T, R33A, K34A, R33A+K34A (double mutant), E181Q and/or L182A of rAPOBEC1 (SEQ ID NO:67).

[0016] In some embodiments, the CGBE further includes one or more mutations at its cytidine deaminase rAPOBEC1 (or any one of its ortho- or paralogues listed in Tables A or B) residues corresponding to E24, V25; R118, Y120, H121, R126; W224-K229; P168-1186; L173+L180; R15, R16, R17, to K15-17 &A15-17; Deletion E181-L210; P190+P191; Deletion L210-K229 (C-terminal); and/or Deletion S2-L14 (N-terminal) of SEQ ID NO:67.

[0017] In some embodiments, the CGBE does not comprise one or more UNGs and/or the CGBE further comprises translesion polymerase REV1 (SEQ ID NO: 200) on either the N- or C-terminus or on both. In some embodiments, the CGBE comprises one or more UNGs and the tvBE further comprises a translesion polymerase REV1 (SEQ ID NO: 200). In some embodiments, the translesion polymerase REV1 (SEQ ID NO: 200) is fused to either the N- or C-terminus or both.

[0018] In some embodiments, the CGBE includes a linker between the cytosine deaminase monomer and/or between the cytosine deaminase monomer or single-chain dimers and the programmable DNA binding domain.

[0019] Exemplary Constructs Include:

[0020] 1. CGBE1:

[0021] bpNLS-E.coliUNG-LINKER-rAPOBEC1(R33A)-LINKER-SpCas9(D10A)-bpNLS

[0022] 2. miniCGBE1:

[0023] bpNLS-rAPOBEC1(R33A)-LINKER-SpCas9(D10A)-bpNLS

[0024] In some embodiments, the programmable DNA binding domain is selected from the group consisting of an engineered C2H2 zinc-finger, a transcription activator effector-like effector (TALE), and a Clustered Regularly Interspaced Short Palindromic Repeats (CRISPR) Cas RNA-guided nuclease (RGNs) and variants thereof.

[0025] The CGBE of any one of claims 1-15, wherein the CRISPR RGN is a ssDNA nickase or a catalytically inactive CRISPR Cas RNA-guided nuclease (e.g., a Cas9 or Cas12a that has ssDNA nickase activity or is catalytically inactive); in some embodiments, the Cas RGN is from SpCas9-NG or VRQR-Cas9.

[0026] Also provided herein are base editing systems comprising:

(i) a CGBE as described herein, wherein the programmable DNA binding domain is a CRISPR Cas RGN or a variant thereof; and
(ii) at least one guide RNA compatible with the base editor comprising a spacer sequence that directs the base editor to a target sequence, preferably wherein the target sequence comprises a cytosine at position 4-8, 5-7, or position 6 (with 1 being the most PAM-distal position).

[0027] Also provided herein are isolated nucleic acids encoding a CGBE as described herein, vectors comprising the isolated nucleic acids, and isolated host cells, preferably mammalian host cells (but also plant, bacterial, etc), comprising the nucleic acids or the vectors described herein. In some embodiments, the isolated host cell expresses the CGBE of any one of claims 1-17.

[0028] Additionally provided herein are methods for generating a cytosine-to-guanine and guanine-to-cytosine alteration in a nucleic acid, the method comprising contacting the nucleic acid with the CGBE of any one of claims 1-17, or the base editing system of claim 18.

[0029] In some embodiments, the CGBE achieves at least 15%, at least 20%, at least 25%, at least 30%, at least 35%, at least 40%, at least 45%, least 50%, at least 55%, at least 60%, or at least 63% C-to-G conversions in a target sequence.

[0030] In some embodiments, the target sequence is a sequence within or adjacent to one of the genes in Table E1 or Table E2.

[0031] Also provided herein are methods for generating a cytosine-to-guanine and guanine-to-cytosine alteration in a selected nucleotide of a target region of a nucleic acid. The methods include contacting the nucleic acid with:

[0032] (i) a C-to-G transversion base editor (CGBE) comprising an adenosine deaminase, e.g., a wild type and/or engineered (e.g. ABEs 0.1, 0.2, 1.1, 1.2, 2.1, 2.2, 2.3, 2.4, 2.5, 2.6, 2.7, 2.8, 2.9, 2.10, 2.11, 2.12, 3.1, 3.2, 3.3, 3.4, 3.5, 3.6, 3.7, 3.8, 4.1, 4.2, 4.3, 5.1, 5.2, 5.3, 5.4, 5.5, 5.6, 5.7, 5.8, 5.9, 5.10, 5.11, 5.12, 5.13, 5.14, 6.1, 6.2, 6.3, 6.4, 6.5, 6.6, 7.1, 7.2, 7.3, 7.4, 7.5, 7.6, 7.7, 7.8, 7.9, 7.10, ABEmax) E. coli TadA monomer, or variations of homo- or heterodimers thereof, bearing one or more mutations in either or both monomers that decrease RNA editing activity while preserving DNA editing activity, wherein the mutations are at amino acid positions that correspond to residues of E. coli TadA as listed in Table H, a programmable DNA binding domain comprising a ssDNA nickase or a catalytically inactive CRISPR Cas RNA-guided nuclease; and

[0033] (ii) at least one guide RNA compatible with the base editor and comprising a spacer that directs the base editor to the target sequence, preferably wherein the target sequence comprises a cytosine at position 4-8, 5-7, or position 6 (with 1 being the most PAM-distal position).

[0034] In some embodiments, the cytosine-to-guanine or guanine-to-cytosine alteration is listed in Table D.

[0035] Also provided herein are compositions comprising a CGBE or base editing systems as described herein, optionally including one or more ribonucleoprotein (RNP) complexes.

[0036] Additionally provided herein are the CGBE or base editing systems described herein, for use in generating a cytosine-to-guanine and guanine-to-cytosine alteration in a cell, wherein the alteration corrects a specific disease-related mutation provided in Tables E1 and E2.

[0037] In some embodiments, the CGBE does not comprise a UNG, and the CGBE recruits endogenous UNG with the help of a peptide aptamer fused to the CGBE.

[0038] In some embodiments, the CGBE does not comprise a UNG, and CGBE recruits endogenous UNG with the help of RNA aptamers fused to the gRNA.

[0039] In some embodiments, the CGBE does not comprise a UNG, and the CGBE recruits endogenous UNG with the help of a Fab, scFV or sdAb elements fused to the CGBE.

[0040] In some embodiments, the CGBE does not comprise a UNG, and wherein the CGBE recruits endogenous REV1 translesion polymerase.

[0041] Unless otherwise defined, all technical and scientific terms used herein have the same meaning as commonly understood by one of ordinary skill in the art to which this invention belongs. Methods and materials are described herein for use in the present invention; other, suitable methods and materials known in the art can also be used. The materials, methods, and examples are illustrative only and not intended to be limiting. All publications, patent applications, patents, sequences, database entries, and other references mentioned herein are incorporated by reference in their entirety. In case of conflict, the present specification, including definitions, will control.

[0042] Other features and advantages of the invention will be apparent from the following detailed description and figures, and from the claims.

### DESCRIPTION OF DRAWINGS

[0043] FIGS. 1A-D. C-to-G transversion at position C6 in the FANCF site 1 spacer as an on-target byproduct of ABEmax and miniABEmax treatment in human HEK293T cells. FIG. 1A. Efficient DNA on-target A-to-G editing of the adenine in position 4 of the spacer (with 1 being the most PAM-distal position) by ABEmax and two miniABEmax variants compared to a nCas9-only negative control. 1B. C-to-G editing of the DNA cytosine in position 6 of the FANCF site 1 spacer in all ABE variants tested in the same experiment as shown in FIG. 1A. 1C. C-to-T editing of the DNA cytosine in position 6 of the FANCF site 1 spacer in all ABE variants tested in the same experiment as shown in FIG. 1A. 1D. C-to-A editing of the DNA cytosine in position 6 of the FANCF site 1 spacer in all ABE variants tested in the same experiment as shown in a. All data generated from independent quadruplicate experiments (n=4).

[0044] FIGS. 2A-2C. C-to-G transversion at position C6 is the predominant on-target byproduct on three genomic sites in human HEK293T cells treated with ABEmax and miniABEmax. 2A. C-to-G editing of the DNA cytosine in position 6 of the HEK site 2, ABE site 7, and FANCF site 1 spacer in all ABE variants tested with FANCF site 1 exhibiting the highest editing efficiencies as shown in FIGS. 1A-D. 2B. C-to-T editing of C6 was seen only at FANCF site 1. 2C. C-to-A editing in position 6 was only seen at consistently high levels at around 1-5% at FANCF site 1.

[0045] FIG. 3. Potential mechanism of action explaining C-to-G editing byproducts induced by ABE treatment in human HEK293T cells—part I. Schematic of an ABEmax protein inducing parallel targeted A-to-I deamination in the target ssDNA bubble as well as potentially inducing byproduct C-to-U deamination on position 6 of the spacer.

[0046] FIG. 4. Potential mechanism of action explaining C-to-G editing byproducts induced by ABE treatment in human HEK293T cells—part II. Schematic of uracil excision by UNG after the byproduct C-to-U deamination on position 6 was induced by ABE, leading to an abasic site at position 6 of the spacer. Downstream activity of mismatch repair (MMR) pathways and of the translesion polymerase REV1 as well as secondary deamination of adenines in C-to-A byproducts could potentially explain the higher proportion of C-to-G outcomes in position 6.

[0047] FIG. 5. Schematic drawing of approach to increase C-to-G product. Leveraging downstream processing of abasic sites by e.g. MMR and REV1, we propose using a CBE fusion protein containing a cytidine deaminase to enhance C-to-U deamination compared to ABE. In contrast to conventional CBE architectures, we propose to exchange the UGIs for a single or multiple UNG proteins to further increase the creation of abasic sites, thereby increasing the input for potential MMR and REV1 processing that may eventually lead to improved C-to-G editing yield.

[0048] FIG. 6. Schematic drawing of a C-to-G transversion base editor (CGBE) architecture. An N-terminal deaminase domain, e.g. rAPOBEC1, FERNY-APOBEC1, evoFERNY-APOBEC1, evoAPOBEC1, AID, A3A, eA3A, pmCDA1, A3G or an E. coli TadA mutant was fused to a catalytically impaired DNA binding protein, e.g. dCas9 or Cas9 nickase (D10A). An E. coli or human UNG protein was fused to the C-terminus.

[0049] FIG. 7. Schematic drawing of a C-to-G transversion base editor (CGBE) architecture that can show reduced indel byproduct frequency by fusing bacteriophage Mu Gam protein. The depicted fusion proteins showed a highly similar composition as the construct in FIG. 6 with the exception of the N-terminal (or C-terminal) fusion of the bacteriophage Mu Gam protein to reduce indel fractions, i.e. also in combination with the use of catalytically inactive Cas9 (dCas9).

[0050] FIG. 8. Schematic drawing of a C-to-G transversion base editor (CGBE) architecture with a fusion of the translesion polymerase REV1. In this construct, the anatomy of the initial CGBE (FIG. 6) was altered by exchanging UNG for REV1 on the C- or N-terminus.

[0051] FIG. 9. Schematic drawing of a C-to-G transversion base editor (CGBE) architecture with a fusion of both UNG and the translesion polymerase REV1. In this construct, the anatomy of the initial CGBE (FIG. 6) was altered by adding REV1 on the C- or N-terminus, leading to a CGBE variant that contains both UNG and REV1 as a direct fusion.

[0052] FIG. 10. Schematic drawing showing a construct where the anatomy of the initial CGBE (FIG. 6) was altered by fusing a peptide aptamer to the C- or N-terminus in order to recruit endogenous UNG instead of directly fusing UNG to the deaminase-Cas9 fusion protein.

[0053] FIG. 11. Schematic drawing showing a construct where the anatomy of the initial CGBE (FIG. 6) was altered by fusing a scFV, Fab or sdAb to the C- or N-terminus in order to recruit endogenous UNG instead of directly fusing UNG to the deaminase-Cas9 fusion protein.

[0054] FIG. 12. Schematic drawing showing a construct where the anatomy of the initial CGBE (FIG. 6) was altered by encoding an RNA aptamer directly in the gRNA in order to recruit endogenous UNG instead of directly fusing UNG to the deaminase-Cas9 fusion protein.

[0055] FIG. 13. Engineering of a C-to-G base editor. Bar plots showing on-target DNA base editing frequencies with various base editor architectures using seven gRNAs targeting genomic sites in HEK293T cells. N and C indicate amino-terminal and carboxy-terminal ends, respectively, of the various base editors. Gray overlay bars at top represent deletions at each editing window. Target cytosines are highlighted. Editing frequencies of three independent replicates (n=3) at each base are displayed side-by-side. Percentage values below specific cytosine bases indicate the average C-to-G editing observed (values below 3% not reported). Numbering on the bottom indicates position of the base in the protospacer with 1 being the most PAM-distal base. Arrowheads indicate cytosines showing C-to-G edits. Arrows point at examples of C-to-G edits.

[0056] FIG. 14. On-target activities of nCas9 controls, ABE variants, and more CBE variants tested for C-to-G editing in HEK293T cells. Bar plots showing the on-target DNA base editing frequencies induced by nCas9 negative controls, ABE and ABE variants, and other CBE variants with seven gRNAs in HEK293T cells. N and C indicate amino-terminal and carboxy-terminal ends, respectively, of the various base editors. Gray overlay bars at top represent deletions at each editing window. Editing frequencies of three independent replicates (n=3) at each base are displayed side-by-side. Percentage values below specific cytosine bases indicate the average C-to-G editing observed (values below 3% not reported). Numbering on the bottom indicates position of the base in the protospacer with 1 being the most PAM-distal base. Arrowheads indicate cytosines showing C-to-G edits.

[0057] FIGS. 15A-B. Indel frequencies of nCas9 controls, ABE variants, and CBE variants tested for C-to-G editing in HEK293T cells. a,b, Dot plots representing percentage of alleles that contain an insertion or deletion across the entire protospacer from experiments with various base editor architectures reported in FIG. 14 (15a) or FIGS. 13 and 14 (15b). Single dots represent individual replicates.

[0058] FIG. 16. On-target activities of non-APOBEC1 CBE variants tested for C-to-G editing in HEK293T cells. Bar plots showing the on-target DNA base editing frequencies induced by non-APOBEC1 CBEs and their variants with h/eUNG with seven gRNAs in HEK293T cells. N and C indicate amino-terminal and carboxy-terminal ends, respectively, of the various base editors. Gray overlay bars at top represent deletions at each editing window. Editing frequencies of three independent replicates (n=3) at each base are displayed side-by-side. Percentage values below specific cytosine bases indicate the average C-to-G editing observed (values below 3% not reported). Numbering on the bottom indicates position of the base in the protospacer with 1 being the most PAM-distal base. Arrowheads indicate cytosines showing C-to-G edits.

[0059] FIG. 17. Indel frequencies of non-APOBEC1 CBE variants tested for C-to-G editing in HEK293T cells. Dot plots representing percentage of alleles that contain an insertion or deletion across the entire protospacer from experiments with non-APOBEC1 CBE variants reported in FIG. 16. Single dots represent individual replicates.

[0060] FIGS. 18A-B. Additional characterization of CGBE1 on-target editing activities in HEK293T cells. A,B, Bar plots showing the on-target DNA base editing frequencies induced by BE4max(R33A) and CGBE1 using 12 gRNAs with a C at position 6 (C6-sites; 18A) and 6 gRNAs with a C at position 4, 5, 7, or 8 (non-C6-sites; 18B) in HEK293T cells. N and C indicate amino-terminal and carboxy-terminal ends, respectively, of the various base editors. Gray overlay bars at top represent deletions at each editing window. Editing frequencies of three independent replicates (n=3) at each base are displayed side-by-side. Percentage values below specific cytosine bases indicate the average C-to-G editing observed (values below 3% not reported). Numbering on the bottom indicates position of the base in the protospacer with 1 being the most PAM-distal base. Arrowheads indicate cytosines showing C-to-G edits.

[0061] FIG. 19. Aggregated distribution of editing and indel frequencies across protospacer of BE4max(R33A) and CGBE1 in HEK293T cells. Dot and box plots representing the combined distribution of C-to-G, C-to-T, C-to-A, and indel frequencies (labeled) across the entire protospacer from experiments performed with BE4max(R33A) and CGBE1 using 25 guides. Boxes span the interquartile range (IQR; first to third quartiles), horizontal lines indicate the median (second quartile), and whiskers extend to ±1.5×IQR. Single dots represent individual replicates. The graphs were derived from the data shown in FIGS. 13 and 18A-B.

[0062] FIGS. 20A-B. On-target activities of nCas9 controls and CGBE1-related variants with more gRNAs in HEK293T cells. A,B, Bar plots showing the on-target DNA base editing frequencies of nCas9 controls and CGBE1-related variants using 12 gRNAs with a C at position 6 (C6-sites; 20A) and 6 gRNAs with a C at position 4, 5, 7, or 8 (non-C6-sites; 20B) in HEK293T cells. N and C indicate amino-terminal and carboxy-terminal ends, respectively, of the various base editors. Gray overlay bars at top represent deletions at each editing window. Editing frequencies of three independent replicates (n=3) at each base are displayed side-by-side. Percentage values below specific cytosine bases indicate the average C-to-G editing observed (values below 3% not reported). Numbering on the bottom indicates position of the base in the protospacer with 1 being the most PAM-distal base. Arrowheads indicate cytosines showing C-to-G edits.

[0063] FIG. 21. Indel frequencies of CGBE1 and CGBE1-related variants with more gRNAs in HEK293T cells. Dot plots representing percentage of alleles that contain an insertion or deletion across the entire protospacer from experiments with CGBE1-related variants reported in FIGS. 18A-B and 20A-B. Single dots represent individual replicates.

[0064] FIGS. 22A-B. Comparison of CGBE1 and miniCGBE1 on-target editing activities with 25 gRNAs in HEK293T cells. A,B, Bar plots showing the on-target DNA base editing frequencies of CGBE1 and miniCGBE1 using 19 gRNAs with a C at position 6 (C6-sites; 22A) and 6 gRNAs with a C at position 4, 5, 7, or 8 (non-C6-sites; 22B) in HEK293T cells. N and C indicate amino-terminal and carboxy-terminal ends, respectively, of the various base editors. Gray overlay bars at top represent deletions at each editing window. Editing frequencies of three independent replicates (n=4) at each base are displayed side-by-side. Percentage values below specific cytosine bases indicate the average C-to-G editing observed (values below 3% not reported). Numbering on the bottom indicates position of the base in the protospacer with 1 being the most PAM-distal base. Arrowheads indicate cytosines showing C-to-G edits.

[0065] FIGS. 23A-B. On-target activities of nCas9 control with 25 gRNAs in HEK293T cells. A,B, Bar plots showing the on-target DNA base editing frequencies observed with expression of a nCas9 negative control using 19 gRNAs with a C at position 6 (C6-sites; 23A) and 6 gRNAs with a C at position 4, 5, 7, or 8 (non-C6-sites; 23B) in HEK293T cells. N and C indicate amino-terminal and carboxy-terminal ends, respectively, of the various base editors. Gray overlay bars at top represent deletions at each editing window. Editing frequencies of three independent replicates (n=4) at each base are displayed side-by-side. Percentage values below specific cytosine bases indicate the average C-to-G editing observed (values below 3% not reported). Numbering on the bottom indicates position of the base in the protospacer with 1 being the most PAM-distal base. Arrowheads indicate cytosines showing C-to-G edits in respective CGBE experiments.

[0066] FIG. 24. Indel frequencies of CGBE1 and miniCGBE1 variants with 25 gRNAs in HEK293T cells. Dot plots representing percentage of alleles that contain an insertion or deletion across the entire protospacer from experiments with CGBE1 and miniCGBE1 reported in FIG. 22 and control experiments reported in FIG. 23. Single dots represent individual replicates.

[0067] FIG. 25. Additional comparison of CGBE1 and miniCGBE1 on-target editing activities with 23 non-C6 gRNAs in HEK293T cells. Bar plots showing the on-target DNA base editing frequencies induced by nCas9 control, BE4max, BE4max(R33A), CGBE1, and miniCGBE1 with 23 gRNAs for sites with a C at position 4, 5, 7, or 8 (non-C6 sites) in HEK293T cells. N and C indicate amino-terminal and carboxy-terminal ends, respectively, of the various base editors. Gray overlay bars at top represent deletions at each editing window. Editing frequencies of three independent replicates (n=3) at each base are displayed side-by-side. Percentage values below specific cytosine bases indicate the average C-to-G editing observed (values below 3% not reported). Numbering on the bottom indicates position of the base in the protospacer with 1 being the most PAM-distal base. Arrowheads indicate cytosines showing C-to-G edits.

[0068] FIG. 26. Indel frequencies of CGBE1 and miniCGBE1 variants with 23 non-C6 gRNAs in HEK293T cells. Dot plots representing percentage of alleles that contain an insertion or deletion across the entire protospacer from experiments with BE4max, BE4max(R33A), CGBE1 and miniCGBE1 reported in FIG. 25. Single dots represent individual replicates.

[0069] FIGS. 27A-B. Aggregated distribution of C-to-G editing frequencies across protospacer of CGBE1 and miniCGBE1 in HEK293T cells. A,B, Dot and box plots representing the aggregate distribution of C-to-G (yellow) editing frequencies across the entire protospacer from experiments performed with CGBE1 (27A) and miniCGBE1 (27B) with all 48 tested gRNAs. Boxes span the interquartile range (IQR; first to third quartiles), horizontal lines indicate the median (second quartile), and whiskers extend to ±1.5×IQR. Single dots represent individual replicates. The graphs were derived from the data shown in FIGS. 22A-B and 25.

[0070] FIG. 28. Off-target DNA editing activities of CGBE1 and miniCGBE1 in HEK293T cells. Bar plots showing the off-target DNA base editing frequencies induced by nCas9 control, BE4max, BE4max(R33A), CGBE1, and miniCGBE1 using HEK site 2, HEK site 3, HEK site 4, EMX1 site 1, and FANCF site 1 gRNAs in HEK293T cells. N and C indicate amino-terminal and carboxy-terminal ends, respectively, of the various base editors. Gray overlay bars at top represent deletions at each editing window. Editing frequencies of three independent replicates (n=3) at each base are displayed side-by-side. Percentage values below specific cytosine bases indicate the average C-to-D (D=A/T/G) editing observed (values below 1% not reported). Numbering on the bottom indicates position of the base in the protospacer with 1 being the most PAM-distal base. Arrowheads indicate cytosines showing C-to-G edits.

[0071] FIG. 29. Indel frequencies of CGBE1 and miniCGBE1 variants for DNA off-targets in HEK293T cells. Dot plots representing percentage of alleles that contain an insertion or deletion across the entire protospacer from experiments with BE4max, BE4max(R33A), CGBE1 and miniCGBE1 reported in FIG. 28. Single dots represent individual replicates.

[0072] FIG. 30. On-target DNA editing activities of NG and VRQR variants of CGBE1 and miniCGBE1 in HEK293T cells. Bar plots showing the on-target DNA base editing frequencies induced by NG and VRQR variants of nCas9, CGBE1, and miniCGBE1 using 6 gRNAs that target AT-rich genomic loci with PAMs that are compatible with SpCas9-NG (NGT) and SpCas9-VRQR (NGAG) variants in HEK293T cells. N and C indicate amino-terminal and carboxy-terminal ends, respectively, of the various base editors. Gray overlay bars at top represent deletions at each editing window. Editing frequencies of three independent replicates (n=4) at each base are displayed side-by-side. Percentage values below specific cytosine bases indicate the average C-to-G editing observed (values below 3% not reported). Numbering on the bottom indicates position of the base in the protospacer with 1 being the most PAM-distal base. Arrowheads indicate cytosines showing C-to-G edits.

[0073] FIG. 31. Indel frequencies of NG and VRQR variants of CGBE1 and miniCGBE1 variants in HEK293T cells. Dot plots representing percentage of alleles that contain an insertion or deletion across the entire protospacer from experiments with NG and VRQR variants of CGBE1 and miniCGBE1 reported in FIG. 30. Single dots represent individual replicates.

[0074] FIG. 32. Potential mechanism of prime editing system. Schematic of prime editing (PE) used to install a C-to-G substitution. PE fusion protein consists of an SpCas9-H840A nickase fused to an engineered Moloney murine leukemia virus reverse transcriptase (MMLV-RT). The prime editing guide RNA (pegRNA) consists of a standard targetable SpCas9 gRNA that also harbors a 3′ extension containing a primer binding site (PBS) and a reverse transcription template (RTT) that encodes the desired edit. PE2 system encompasses the prime editor fusion protein and a pegRNA. PE3 system additionally includes a nicking gRNA (ngRNA).

[0075] FIGS. 33A-B. Testing PE2 and PE3 in multiple human cell lines. A,B, Bar and dot plots representing the on-target DNA prime editing and indel frequencies of PE2 and PE3 targeting FANCF site 1 for G-to-T prime editing (33A) and HEK site 3 for PE-induced CTT insertion (33B) in 4 cell lines. Single dots represent individual replicates. Error bars represent standard deviation.

[0076] FIG. 34. Comparing the editing activities of CGBEs and PEs in multiple human cell lines. Bar plots showing the average on-target DNA C-to-G base or prime editing frequencies induced by CGBE1, miniCGBE1, PE2, or PE3 on four genomic target loci. Each site in each cell line was tested with four independent replicates in HEK293T cells and three independent replicates in K562, U205, and HeLa cells. Single dots represent individual replicates. A two-tailed Student's t-test with p-values adjusted for multiple testing was used to calculate the shown p-values. Error bars represent standard deviations.

[0077] FIG. 35. Testing pegRNAs and nicking gRNAs with wild-type SpCas9 in HEK293T cells. Bar and dot plots representing the frequency of alleles with indels (%) induced by pegRNAs and nicking gRNAs used in the experiments in FIGS. 33 and 34 (and FANCF site 1+21 ngRNA control) with wild-type SpCas9 in HEK293T. pegRNAs/ngRNAs designed by Anzalone et al. and by us are separated by the dashed line. Single dots represent individual replicates. Error bars represent standard deviations. ND, not done.

[0078] FIG. 36. Additional comparisons of CGBE1, miniCGBE1, PE2, and PE3 on-target editing activities in HEK293T, K562, U2OS, and HeLa cells. Bar plots showing the on-target DNA editing frequencies induced by nCas9 controls, CGBE1, miniCGBE1, PE2, and PE3 with four gRNAs (CGBEs), four pegRNAs (PE2), or 4 pegRNA/nicking gRNA combinations (PE3), designed to install a C-to-G substitution at the same cytosine at four genomic loci in four cell lines. Gray overlay bars at top represent deletions at each site. Editing frequencies of four independent replicates (n=4) for HEK293T cells or three independent replicates (n=3) for K562, U2OS, and HeLa cells at each base are displayed side-by-side. Percentage values below cytosine bases reflect the average C-to-G editing observed (values below 3% not reported). Numbering on the bottom indicates position of the base with 1 being the most PAM-distal base for base editors, or the first nucleotide 3′ of the pegRNA/Cas9-induced nick for prime editors. Arrowheads indicate cytosines showing C-to-G edits.

[0079] FIG. 37. Indel frequencies of CGBE1, miniCGBE1, PE2, and PE3 in HEK293T, K562, U2OS, and HeLa cells. Dot plots representing percentage of alleles that contain an insertion or deletion across the entire protospacer from experiments with CGBE1, miniCGBE1, PE2, and PE3 reported in FIGS. 34 and 36. Single dots represent individual replicates.

### DETAILED DESCRIPTION

[0080] ABEs install A-to-G substitutions in DNA while CBEs allow for the introduction of C-to-T mutations. However, both these types of mutations represent transitions and the extensive subset of disease-associated transversion mutations—e.g. C-to-G mutations-cannot be directly targeted with neither CBEs nor ABEs.

[0081] We sought to engineer a C-to-G transversion base editor (CGBE) that enables the programmable installation of C-to-G and G-to-C mutations. Based on our finding that ABE proteins that do not comprise UGIs can reproducibly induce C-to-G editing at position 6 of the spacer (with 1 being the most PAM-distal position) at mutliple genomic sites (FIGS. 1 and 2; Grunewald et al, Nature Biotechnology 2019), we hypothesized that we could engineer a base editing construct that might allow for higher C-to-G yield. We engineered CGBEs comprised of cytidine deaminases or adenosine deaminases or both (e.g. as in dual-deaminase architecture of bifunctional adenine and cytosine base editors, BACE) fused to DNA binding proteins (e.g. dCas9 or nickase Cas9) as well as to UNG or REV1 proteins or a combination thereof. We hypothesized that using a cytidine deaminase will increase C-to-U deamination rates at C6 or neighboring cytosines at the target ssDNA bubble, and fusing base excision repair (BER) protein UNG or translesion polymerase REV1 (without fusing a UGI) might enable increased formation of an abasic site at position 6 of the genomic target site. Downstream processing of the abasic site via MMR or translesion synthesis could subsequently yield higher C-to-G product (FIG. 3-5). Described herein are a number of different fusion protein architectures involving the abovementioned domains and proteins. Some embodiments use dCas9 and/or bacteriophage Mu Gam (FIG. 6-9; Komor et al, Sci Adv 2017) to reduce insertion/deletion (indel) byproducts, thereby further increasing relative C-to-G product yield and purity. In some embodiments, the methods include recruiting endogenous UNG to the programmable base editing target site with the use of peptide aptamers fused to CGBEs (delta UNG), RNA aptamers integrated into the gRNA or CGBE (delta UNG) fusion proteins harboring scFVs, sdABs or Fabs to recruit endogenous UNG (FIG. 10-12).

[0082] Thus, described herein are variants of base editor fusion proteins that enable the programmable introduction of transversion base edits, specifically C-to-G and G-to-C. A table of potentially actionable codon and amino acid changes are shown in Table D and a list of potential disease targets (using Cas proteins compatible with NGG, NG, and NGA-PAMs) is shown in Tables E1-E3.

### Exemplary Cytidine Deaminase Domains Used for CGBE

[0083] In some embodiments, the cytidine deaminase is pmCDA1 (sea lamprey) or APOBEC1 from rat, or from a different species (Table A), e.g., a different mammalian species such as H. sapiens. The APOBEC, AICDA (AID) and CDA1 family members have high sequence homology and represent potential candidates for CGBE architectures (Table B)^{2,15-18}.

[0084] Specifically, reduced RNA editing variants of rAPOBEC1, enhanced human A3A, and human AID are candidates for inclusion into CGBE architectures.

[0085] In some embodiments, CGBE described herein can be a wild-type BE4max or SECURE-BE4max-R33A as well as eA3A variants with truncated UGIs and additional N- or C-terminal fusion of a human or E. coli UNG.

[0086] In some embodiments, the cytidine deaminases in Anc-BE4max, evoAPOBEC1-BE4max (SEQ ID 205), FERNY-BE4max, evoFERNY-BE4max (SEQ ID 204), CDA1-BE4max, and evoCDA1-BE4max may be used in a BE4max architecture with truncated UGIs and optionally also have UNGs (human or E. coli, N- or C-terminal) added. In other embodiments, the SECURE-CBE R33 and/or K34 residue changes may be introduced in evoAPOBEC1.

[0087] In some embodiments, R13 and/or K14 residue changes are introduced in FERNY and evoFERNY-APOBEC1 (these residue changes are embedded in the same amino acid sequence motif as R33 and K34 in WT rat APOBEC1 that was used in BE3, BE4, and BE4max). These modifications (single or double residue change) can greatly reduce RNA off-target editing and enhance on-target C-to-G editing. All of the APOBEC1-based CBEs described herein can used with or without the proposed mutations in the context of a C-to-G transversion base editor.

[0088] The cytidine deaminase domain need not include an entire full protein, but can be a variant as described herein that has changes or truncations that do not abolish the cytidine deaminase activity.

### Exemplary Adenosine Deaminase Domains Used for CGBE

[0089] In some embodiments, the adenosine deaminase is TadA from E. coli, or an orthologue from a different prokaryote, e.g. S. aureus, or a homologue from the eukaryotic domain, such as yeast TAD1/2 or a mammalian species such as human (e.g. ADAT2; Table C). The tRNA-specific adenosine deaminase family members have high sequence homology and many of these orthologues may be compatible with one or more of the amino acid substitutions in E. coli TadA expected to cause an RRE phenotype and would be desirable in a CGBE architecture.

[0090] The wild type sequence of wild type E. coli TadA, available in uniprot at P68398, is as follows:

(SEQ ID NO: 1)
MSEVEFSHEYWMRHALTLAKRAWDEREVPVGAVLVHNNRVIGEGWNRPI
GRHDPTAHAEIMALRQGGLVMQNYRLIDATLYVTLEPCVMCAGAMIHSR
IGRVVFGARDAKTGAAGSLMDVLHHPGMNHRVEITEGILADECAALLSD
FFRMRRQEIKAQKKAQSSTD.

[0091] The engineered E. coli TadA sequence present in ABE7.10 and ABEmax is as follows:

SEVEFSHEYWMRHALTLAKRARDEREVPVGAVLVLNNRVIGEGWNRAIG
LHDPTAHAEIMALRQGGLVMQNYRLIDATLYVTFEPCVMCAGAMIHSRI
GRVVFGVRNAKTGAAGSLMDVLHYPGMNHRVEITEGILADECAALLCYF
FRMPRQVFNAQKKAQSSTD.

[0092] In the most commonly used ABEs (ABE7.10 and ABEmax), these two proteins were fused using a 32 amino acid linker (bolded in sequence below), forming a heterodimer, the sequence of which is as follows:

MSEVEFSHEYWMRHALTLAKRAWDEREVPVGAVLVHNNRVIGEGWNRPI
GRHDPTAHAEIMALRQGGLVMQNYRLIDATLYVTLEPCVMCAGAMIHSR
IGRVVFGARDAKTGAAGSLMDVLHHPGMNHRVEITEGILADECAALLSD
FFRMRRQEIKAQKKAQSSTDSGGSSGGSSGSETPGTSESATPESSGGSS
GGSSEVEFSHEYWMRHALTLAKRARDEREVPVGAVLVLNNRVIGEGWNR
AIGLHDPTAHAEIMALRQGGLVMQNYRLIDATLYVTFEPCVMCAGAMIH
SRIGRVVFGVRNAKTGAAGSLMDVLHYPGMNHRVEITEGILADECAALL
CYFFRMPRQVFNAQKKAQSSTD.

[0093] Other exemplary sequences are shown in Table C. These tRNA-specific adenosine deaminase orthologues and homologues also represent candidates for inclusion of the mutations previously described at analogous positions in these proteins.

[0094] In some embodiments, the base editors included catalytically dead adenine deaminase variants, e.g. E59A. (Gaudelli et al, 2017, PMID: 29160308) as part of a heterodimer.

[0095] The adenine deaminase domain need not include an entire full protein, but can be a variant as described herein that has changes or truncations that do not abolish the adenine deaminase activity.

### Uracil DNA Dlycosylase (UNG)

[0096] Cellular molecular pathways are in complete homeostasis within healthy cells. Especially, DNA repair pathways are balanced in ways that potentially mutagenic lesions are repaired at the optimal level. In mammalian cells, there is continuous generation of deamination mutations and repair of deamination reactions occurring in the background. Impairments in this process can lead to disruption of this homeostasis. On the deamination side, aberrant overexpression of deaminases that can induce spontaneous deamination at DNA and RNA levels has been shown to be responsible for inducing different cancers.^{10,11} On the other hand, expression levels of DNA glycosylases—a family of enzymes responsible for repairing the deaminated bases via the base excision repair (BER) pathway—are also crucial. DNA glycosylases carry out their activity by removing the lesions and creating abasic sites. Overexpression of uracil DNA glycosylase (UNG) has been shown to confer chemotherapy resistance in certain cancers.¹² Moreover, overexpression of uracil glycosylase inhibitor (UGI), a component of CBEs, is potentially responsible for the observed levels of toxicity and genome-wide Cas9-independent DNA off-target effects that can be induced by CBEs. In the light of these aforementioned independent observations, it is clear that one needs to control and optimize the expression levels of the exogeneous base editor constructs in order to minimize the potential unwanted side-effects to the target cells and preserve the homeostasis.

[0097] In some embodiments of the C-to-G transversion base editors (CGBEs) described herein, Uracil-DNA glycosylase (UNG) is a critical component that carries out the generation of abasic sites after cytosines are deaminated to uracil.

[0098] Exemplary UNG/SMUG Sequences for Inclusion in CGBE

[0099] In some embodiments, the CGBE fusion proteins described herein include a functional UNG or Single-Strand-Selective Monofunctional Uracil-DNA Glycosylase 1 (SMUG1) domain. Table J provides a list of UNG and SMUG1 orthologues.

[0100] Recruiting Endogenous UNG to Target and Edit Genetic Loci

[0101] While overexpression of engineered constructs is the first and main strategy to edit genomic loci, it has been well established that overexpression of exogeneous proteins can have unwanted and fatal consequences. In the context of base editors specifically, it has been demonstrated that overexpression of base editors can induce hundreds to thousands of off-target single nucleotide variations (SNVs) on DNA and RNA.^{6,7,13,14} All in all, there is great need to temporally and spatially control the expression levels of base editors in target cells. To this end, recruiting the endogenous cellular machinery to carry out the enzymatic reactions of interest, instead of exogenously providing a protein in excess, is a prominent bypass to minimize exogeneous components that need to be overexpressed.

[0102] It is possible that exogeneous overexpression of human or bacterial UNG may alter the repair pathway balance towards more efficient abasic site generation genome-wide. While more research is warranted to elucidate the impact of such UNG overexpression in mammalian cells, bypassing the need for overexpression of an immunogenic (in the case of E. coli UNG) protein and preserving the natural endogenous expression levels of UNG would be advantageous. To this end, we are proposing to utilize three alternative methods/constructs with the aim of recruiting the endogenous UNG to the target site of deamination.

### Section 1: Peptide Aptamer Mediated Recruiting of UNG to the Target Site

[0103] Peptide aptamers are small amino acid sequences that can be designed and selected against virtually any given protein of interest. Peptide aptamers can have dissociation constants similar to naturally found antibodies. Owing to their small size, ease of production, high specificity, higher stability and solubility, peptide aptamers represent a significant alternative to the antibodies. Starting from an initial randomized library of peptides, peptide aptamers can be selected and further optimized via various methods in vitro and in vivo.

[0104] Fusing an engineered peptide aptamer against human UNG into our CGBE constructs would allow us to recruit endogenous UNG bypassing the need to overexpress the protein exogenously. (FIG. 10)

[0105] Also, various peptide aptamers can be engineered from scratch against human UNG by methods including but not limited to yeast-two-hybrid systems in vivo, and phage-display in vitro systems. Candidate peptide aptamers displaying strong affinity against human UNG will be sequenced and the identified DNA and amino acid sequences will be employed as fusion partners in our next generation CGBE constructs. Optimal conformation of the peptide aptamer fusion will be determined empirically by cloning it into different sites in our constructs with different linkers.

### Section 2: RNA Aptamer Mediated Recruiting of UNG to the Target Site

[0106] RNA aptamers are short stretches (80-120 nucleotides) of RNA molecules with strong and selective affinity against the target proteins of interest. Candidate RNA aptamers can be chemically synthesized as randomized libraries and several rounds of in vitro and in vivo selections can be applied. Employing the method called Systematic Evolution of Ligands by EXponential enrichment (SELEX), a number of candidate RNA aptamer molecules can be identified against one's target protein of interest.

[0107] As an example, the fusion of MS2 aptamers to CRISPR gRNAs is a widely used and well-known example of such a strategy. In this strategy, MS2 RNA aptamers are fused to the ends of gRNA constructs, thereby enabling specific recruitment of MS2 bacteriophage coat protein fused target proteins. Therefore, we propose that fusing an already engineered RNA aptamer against human UNG, if any exists, into the gRNA component of our CGBE constructs would allow us to recruit endogenous UNG bypassing the need to overexpress exogenously. (FIG. 12)

[0108] Also, various RNA aptamers against human UNG can be engineered by strategies including but not limited to the available in vitro and in vivo SELEX strategies in the literature. Candidate RNA aptamers displaying strong affinity against human UNG will be sequenced and identified RNA sequences will be employed as gRNA fusion partners in our next generation CGBE constructs. Optimal conformation of the RNA aptamer fusion will be determined empirically by cloning it into different sites in our gRNA constructs with different linkers.

Section 3: Fab, scFV, or sdAb Mediated Recruiting of UNG to the Target Site

[0109] Antibodies are naturally expressed immunological proteins comprised of two light and two heavy chain proteins expressed from different genes. They are selected against specific parts (epitopes) of specific target proteins (antigens) in immune cells. Therefore, they can selectively bind to target antigens with high affinities. Antibodies are large molecules (˜150 kDa) consisting of a constant region (Fc) and antigen binding regions (Fab) with number of disulfide bonds in between chains. Therefore, it is not practical to generate a single peptide fusion protein fused with a large intact multimeric antibody and one's protein of interest.

[0110] However, getting rid of the Fc portion and using a single Fab portion of an antibody is a smaller (˜50 kDa) and more viable option to have than having a UNG fusion partner. Important to note is that the Fab portion still has constant regions of heavy and light chains that can be further resected while retaining the antigen specific binding affinity. This approach produces a shorter fragment (˜25 kdA) called single-chain variable fragment (scFv) that is linked with each other via short peptide linker. scFv consists of variable domains of heavy and light chains. Taking one step further and separating variable domains of heavy and light chains and producing a single chain (thus single variable domain) antibody fragment is called single-domain antibodies (sdAb) or nanobodies. This is the smallest of all antibody fragments (˜12-15 kDa) around 110 amino acids in length.

[0111] Given these premises, fusing an Fab, scFv or sdAb raised against human UNG target protein to our CGBE constructs in different conformations would be a viable option to recruit the endogenous human UNG to the target loci.

[0112] Also, various new Fabs, scFvs and sdAbs against human UNG can be generated by methods including but not limited to generating a mouse hybridoma clone, then converting full IgG (or IgM) into a scFv, Fab or sdAb; generating an immunized phage display scFv, Fab or sdAb mouse library, then using human UNG to screen the library; screening a premade scFv, Fab or sdAb antibody phage display library; generating synthetic libraries by altering the variable domains of antibodies via introducing random oligonucleotides, then screening against human UNG.

[0113] Candidate Fabs, scFvs or sdAbs displaying strong affinity against human UNG will be sequenced and the identified DNA and amino acid sequences will be employed as fusion partners in our next generation CGBE constructs. Optimal conformation of the fusion partners will be determined empirically by cloning it into different sites in our constructs with different linkers.

### Programmable DNA Binding Domain

[0114] In some embodiments, the base editors include programmable DNA binding domains such as engineered C2H2 zinc-fingers, transcription activator effector-like effectors (TALEs), and Clustered Regularly Interspaced Short Palindromic Repeats (CRISPR) Cas RNA-guided nucleases (RGNs) and their variants, including ssDNA nickases (nCas9) or their analogs and catalytically inactive dead Cas9 (dCas9) and its analogs (e.g., as shown in Table F), and any engineered protospacer-adjacent motif (PAM) or high-fidelity variants (e.g., as shown in Table G). A programmable DNA binding domain is one that can be engineered to bind to a selected target sequence.

### CRISPR-Cas Nucleases

[0115] Although herein we refer to Cas9, in general any Cas9-like nickase could be used (including the related Cpf1/Cas12a enzyme classes), unless specifically indicated. These orthologs, and mutants and variants thereof as known in the art, can be used in any of the fusion proteins described herein. See, e.g., WO 2017/040348 (which describes variants of SaCas9 and SpCas 9 with increased specificity) and WO 2016/141224 (which describes variants of SaCas9 and SpCas 9 with altered PAM specificity).

[0116] The Cas9 nuclease from S. pyogenes (hereafter simply Cas9) can be guided via simple base pair complementarity between 17-20 nucleotides of an engineered guide RNA (gRNA), e.g., a single guide RNA or crRNA/tracrRNA pair, and the complementary strand of a target genomic DNA sequence of interest that lies next to a protospacer adjacent motif (PAM), e.g., a PAM matching the sequence NGG or NAG (Shen et al., Cell Res (2013); Dicarlo et al., Nucleic Acids Res (2013); Jiang et al., Nat Biotechnol 31, 233-239 (2013); Jinek et al., Elife 2, e00471 (2013); Hwang et al., Nat Biotechnol 31, 227-229 (2013); Cong et al., Science 339, 819-823 (2013); Mali et al., Science 339, 823-826 (2013c); Cho et al., Nat Biotechnol 31, 230-232 (2013); Jinek et al., Science 337, 816-821 (2012)). The engineered CRISPR from Prevotella and Francisella 1 (Cpf1, also known as Cas12a) nuclease can also be used, e.g., as described in Zetsche et al., Cell 163, 759-771 (2015); Schunder et al., Int J Med Microbiol 303, 51-60 (2013); Makarova et al., Nat Rev Microbiol 13, 722-736 (2015); Fagerlund et al., Genome Biol 16, 251 (2015). Unlike SpCas9, Cpf1/Cas12a requires only a single 42-nt crRNA, which has 23 nt at its 3′ end that are complementary to the protospacer of the target DNA sequence (Zetsche et al., 2015). Furthermore, whereas SpCas9 recognizes an NGG PAM sequence that is 3′ of the protospacer, AsCpf1 and LbCp1 recognize TTTN PAMs that are found 5′ of the protospacer (Id.).

[0117] In some embodiments, the present system utilizes a wild type or variant Cas9 protein from S. pyogenes or Staphylococcus aureus, or a wild type or variant Cpf1 protein from Acidaminococcus sp. BV3L6 or Lachnospiraceae bacterium ND2006 either as encoded in bacteria or codon-optimized for expression in mammalian cells and/or modified in its PAM recognition specificity and/or its genome-wide specificity. A number of variants have been described; see, e.g., WO 2016/141224, PCT/US2016/049147, Kleinstiver et al., Nat Biotechnol. 2016 August; 34(8):869-74; Tsai and Joung, Nat Rev Genet. 2016 May; 17(5):300-12; Kleinstiver et al., Nature. 2016 Jan. 28; 529(7587):490-5; Shmakov et al., Mol Cell. 2015 Nov. 5; 60(3):385-97; Kleinstiver et al., Nat Biotechnol. 2015 December; 33(12):1293-1298; Dahlman et al., Nat Biotechnol. 2015 November; 33(11):1159-61; Kleinstiver et al., Nature. 2015 Jul. 23; 523(7561):481-5; Wyvekens et al., Hum Gene Ther. 2015 July; 26(7):425-31; Hwang et al., Methods Mol Biol. 2015; 1311:317-34; Osborn et al., Hum Gene Ther. 2015 February; 26(2):114-26; Konermann et al., Nature. 2015 Jan. 29; 517(7536):583-8; Fu et al., Methods Enzymol. 2014; 546:21-45; and Tsai et al., Nat Biotechnol. 2014 June; 32(6):569-76, inter alia. Concerning rAPOBEC1 itself, a number of variants have been described, e.g. Chen et al, RNA. 2010 May; 16(5):1040-52; Chester et al, EMBO J. 2003 Aug. 1; 22(15):3971-82.: Teng et al, J Lipid Res. 1999 April; 40(4):623-35.; Navaratnam et al, Cell. 1995 Apr. 21; 81(2):187-95.; MacGinnitie et al, J Biol Chem. 1995 Jun. 16; 270(24):14768-75.; Yamanaka et al, J Biol Chem. 1994 Aug. 26; 269(34):21725-34. The guide RNA is expressed or present in the cell together with the Cas9 or Cpf1. Either the guide RNA or the nuclease, or both, can be expressed transiently or stably in the cell or introduced as a purified protein or nucleic acid.

[0118] In some embodiments, the Cas9 also includes one of the following mutations, which reduce nuclease activity of the Cas9; e.g., for SpCas9, mutations at D10A or H840A (which creates a single-strand nickase).

[0119] In some embodiments, the SpCas9 variants also include mutations at one of each of the two sets of the following amino acid positions, which together destroy the nuclease activity of the Cas9: D10, E762, D839, H983, or D986 and H840 or N863, e.g., D10A/D10N and H840A/H840N/H840Y, to render the nuclease portion of the protein catalytically inactive; substitutions at these positions could be alanine (as they are in Nishimasu al., Cell 156, 935-949 (2014)), or other residues, e.g., glutamine, asparagine, tyrosine, serine, or aspartate, e.g., E762Q, H983N, H983Y, D986N, N863D, N863S, or N863H (see WO 2014/152432).

[0120] In some embodiments, the Cas9 is fused to one or more SV40 or bipartite (bp) nuclear localization sequences (NLSs) protein sequences; an exemplary (bp)NLS sequence is as follows: (KRTADGSEFES)PKKKRKV (SEQ ID NO: 204). Typically, the NLSs are at the N- and C-termini of an ABEmax fusion protein, but can also be positioned at the N- or C-terminus in other ABEs, or between the DNA binding domain and the deaminase domain. Linkers as known in the art can be used to separate domains.

### TAL Effector Repeat Arrays

[0121] Transcription activator like effectors (TALEs) of plant pathogenic bacteria in the genus Xanthomonas play important roles in disease, or trigger defense, by binding host DNA and activating effector-specific host genes. Specificity depends on an effector-variable number of imperfect, typically ˜33-35 amino acid repeats. Polymorphisms are present primarily at repeat positions 12 and 13, which are referred to herein as the repeat variable-diresidue (RVD). The RVDs of TAL effectors correspond to the nucleotides in their target sites in a direct, linear fashion, one RVD to one nucleotide, with some degeneracy and no apparent context dependence. In some embodiments, the polymorphic region that grants nucleotide specificity may be expressed as a triresidue or triplet.

[0122] Each DNA binding repeat can include a RVD that determines recognition of a base pair in the target DNA sequence, wherein each DNA binding repeat is responsible for recognizing one base pair in the target DNA sequence. In some embodiments, the RVD can comprise one or more of: HA for recognizing C; ND for recognizing C; HI for recognizing C; HN for recognizing G; NA for recognizing G; SN for recognizing G or A; YG for recognizing T; and NK for recognizing G, and one or more of: HD for recognizing C; NG for recognizing T; NI for recognizing A; NN for recognizing G or A; NS for recognizing A or C or G or T; N* for recognizing C or T, wherein * represents a gap in the second position of the RVD; HG for recognizing T; H* for recognizing T, wherein * represents a gap in the second position of the RVD; and IG for recognizing T.

[0123] TALE proteins may be useful in research and biotechnology as targeted chimeric nucleases that can facilitate homologous recombination in genome engineering (e.g., to add or enhance traits useful for biofuels or biorenewables in plants). These proteins also may be useful as, for example, transcription factors, and especially for therapeutic applications requiring a very high level of specificity such as therapeutics against pathogens (e.g., viruses) as non-limiting examples.

[0124] Methods for generating engineered TALE arrays are known in the art, see, e.g., the fast ligation-based automatable solid-phase high-throughput (FLASH) system described in U.S. Ser. No. 61/610,212, and Reyon et al., Nature Biotechnology 30,460-465 (2012); as well as the methods described in Bogdanove & Voytas, Science 333, 1843-1846 (2011); Bogdanove et al., Curr Opin Plant Biol 13, 394-401 (2010); Scholze & Boch, J. Curr Opin Microbiol (2011); Boch et al., Science 326, 1509-1512 (2009); Moscou & Bogdanove, Science 326, 1501 (2009); Miller et al., Nat Biotechnol 29, 143-148 (2011); Morbitzer et al., T. Proc Natl Acad Sci USA 107, 21617-21622 (2010); Morbitzer et al., Nucleic Acids Res 39, 5790-5799 (2011); Zhang et al., Nat Biotechnol 29, 149-153 (2011); Geissler et al., PLoS ONE 6, e19509 (2011); Weber et al., PLoS ONE 6, e19722 (2011); Christian et al., Genetics 186, 757-761 (2010); Li et al., Nucleic Acids Res 39, 359-372 (2011); Mahfouz et al., Proc Natl Acad Sci USA 108, 2623-2628 (2011); Mussolino et al., Nucleic Acids Res (2011); Li et al., Nucleic Acids Res 39, 6315-6325 (2011); Cermak et al., Nucleic Acids Res 39, e82 (2011); Wood et al., Science 333, 307 (2011); Hockemeye et al. Nat Biotechnol 29, 731-734 (2011); Tesson et al., Nat Biotechnol 29, 695-696 (2011); Sander et al., Nat Biotechnol 29, 697-698 (2011); Huang et al., Nat Biotechnol 29, 699-700 (2011); and Zhang et al., Nat Biotechnol 29, 149-153 (2011); all of which are incorporated herein by reference in their entirety.

### Zinc Fingers

[0125] Zinc finger (ZF) proteins are DNA-binding proteins that contain one or more zinc fingers, independently folded zinc-containing mini-domains, the structure of which is well known in the art and defined in, for example, Miller et al., 1985, EMBO J., 4:1609; Berg, 1988, Proc. Natl. Acad. Sci. USA, 85:99; Lee et al., 1989, Science. 245:635; and Klug, 1993, Gene, 135:83. Crystal structures of the zinc finger protein Zif268 and its variants bound to DNA show a semi-conserved pattern of interactions, in which typically three amino acids from the alpha-helix of the zinc finger contact three adjacent base pairs or a “subsite” in the DNA (Pavletich et al., 1991, Science, 252:809; Elrod-Erickson et al., 1998, Structure, 6:451). Thus, the crystal structure of Zif268 suggested that zinc finger DNA-binding domains might function in a modular manner with a one-to-one interaction between a zinc finger and a three-base-pair “subsite” in the DNA sequence. In naturally occurring zinc finger transcription factors, multiple zinc fingers are typically linked together in a tandem array to achieve sequence-specific recognition of a contiguous DNA sequence (Klug, 1993, Gene 135:83).

[0126] Multiple studies have shown that it is possible to artificially engineer the DNA binding characteristics of individual zinc fingers by randomizing the amino acids at the alpha-helical positions involved in DNA binding and using selection methodologies such as phage display to identify desired variants capable of binding to DNA target sites of interest (Rebar et al., 1994, Science, 263:671; Choo et al., 1994 Proc. Natl. Acad. Sci. USA, 91:11163; Jamieson et al., 1994, Biochemistry 33:5689; Wu et al., 1995 Proc. Natl. Acad. Sci. USA, 92: 344). Such recombinant zinc finger proteins can be fused to functional domains, such as transcriptional activators, transcriptional repressors, methylation domains, and nucleases to regulate gene expression, alter DNA methylation, and introduce targeted alterations into genomes of model organisms, plants, and human cells (Carroll, 2008, Gene Ther., 15:1463-68; Cathomen, 2008, Mol. Ther., 16:1200-07; Wu et al., 2007, Cell. Mol. Life Sci., 64:2933-44).

[0127] One existing method for engineering zinc finger arrays, known as “modular assembly,” advocates the simple joining together of pre-selected zinc finger modules into arrays (Segal et al., 2003, Biochemistry, 42:2137-48; Beerli et al., 2002, Nat. Biotechnol., 20:135-141; Mandell et al., 2006, Nucleic Acids Res., 34:W516-523; Carroll et al., 2006, Nat. Protoc. 1:1329-41; Liu et al., 2002, J. Biol. Chem., 277:3850-56; Bae et al., 2003, Nat. Biotechnol., 21:275-280; Wright et al., 2006, Nat. Protoc., 1:1637-52). Although straightforward enough to be practiced by any researcher, recent reports have demonstrated a high failure rate for this method, particularly in the context of zinc finger nucleases (Ramirez et al., 2008, Nat. Methods, 5:374-375; Kim et al., 2009, Genome Res. 19:1279-88), a limitation that typically necessitates the construction and cell-based testing of very large numbers of zinc finger proteins for any given target gene (Kim et al., 2009, Genome Res. 19:1279-88).

[0128] Combinatorial selection-based methods that identify zinc finger arrays from randomized libraries have been shown to have higher success rates than modular assembly (Maeder et al., 2008, Mol. Cell, 31:294-301; Joung et al., 2010, Nat. Methods, 7:91-92; Isalan et al., 2001, Nat. Biotechnol., 19:656-660). In preferred embodiments, the zinc finger arrays are described in, or are generated as described in, WO 2011/017293 and WO 2004/099366. Additional suitable zinc finger DBDs are described in U.S. Pat. Nos. 6,511,808, 6,013,453, 6,007,988, and 6,503,717 and U.S. patent application 2002/0160940.

### Variants

[0129] In some embodiments, the components of the fusion proteins are at least 80%, e.g., at least 85%, 90%, 95%, 97%, or 99% identical to the amino acid sequence of a exemplary sequence (e.g., as provided herein), e.g., have differences at up to 1%, 2%, 5%, 10%, 15%, or 20% of the residues of the exemplary sequence replaced, e.g., with conservative mutations, e.g., including or in addition to the mutations described herein. Optionally the differences can include truncations or deletions. In preferred embodiments, the variant retains a desired activity of the parent, e.g., deaminase activity, and/or the ability to interact with a guide RNA and/or target DNA, optionally with improved specificity or altered substrate specificity.

[0130] To determine the percent identity of two nucleic acid sequences, the sequences are aligned for optimal comparison purposes (e.g., gaps can be introduced in one or both of a first and a second amino acid or nucleic acid sequence for optimal alignment and non-homologous sequences can be disregarded for comparison purposes). The length of a reference sequence aligned for comparison purposes is at least 80% of the length of the reference sequence, and in some embodiments is at least 90% or 100%. The nucleotides at corresponding amino acid positions or nucleotide positions are then compared. When a position in the first sequence is occupied by the same nucleotide as the corresponding position in the second sequence, then the molecules are identical at that position (as used herein nucleic acid “identity” is equivalent to nucleic acid “homology”). The percent identity between the two sequences is a function of the number of identical positions shared by the sequences, taking into account the number of gaps, and the length of each gap, which need to be introduced for optimal alignment of the two sequences. Percent identity between two polypeptides or nucleic acid sequences is determined in various ways that are within the skill in the art, for instance, using publicly available computer software such as Smith Waterman Alignment (Smith, T. F. and M. S. Waterman (1981) J Mol Biol 147:195-7); “BestFit” (Smith and Waterman, Advances in Applied Mathematics, 482-489 (1981)) as incorporated into GeneMatcher Plus™, Schwarz and Dayhof (1979) Atlas of Protein Sequence and Structure, Dayhof, M. O., Ed, pp 353-358; BLAST program (Basic Local Alignment Search Tool; (Altschul, S. F., W. Gish, et al. (1990) J Mol Biol 215: 403-10), BLAST-2, BLAST-P, BLAST-N, BLAST-X, WU-BLAST-2, ALIGN, ALIGN-2, CLUSTAL, or Megalign (DNASTAR) software. In addition, those skilled in the art can determine appropriate parameters for measuring alignment, including any algorithms needed to achieve maximal alignment over the length of the sequences being compared. In general, for proteins or nucleic acids, the length of comparison can be any length, up to and including full length (e.g., 5%, 10%, 20%, 30%, 40%, 50%, 60%, 70%, 80%, 90%, 95%, or 100%). For purposes of the present compositions and methods, at least 80% of the full length of the sequence is aligned.

[0131] For purposes of the present disclosure, the comparison of sequences and determination of percent identity between two sequences can be accomplished using a Blosum 62 scoring matrix with a gap penalty of 12, a gap extend penalty of 4, and a frameshift gap penalty of 5.

[0132] Conservative substitutions typically include substitutions within the following groups: glycine, alanine; valine, isoleucine, leucine; aspartic acid, glutamic acid, asparagine, glutamine; serine, threonine; lysine, arginine; and phenylalanine, tyrosine.

[0133] Also provided herein are isolated nucleic acids encoding the base editor fusion proteins, vectors comprising the isolated nucleic acids, optionally operably linked to one or more regulatory domains for expressing the variant proteins, and host cells, e.g., mammalian host cells, comprising the nucleic acids, and optionally expressing the variant proteins. In some embodiments, the host cells are stem cells, e.g., hematopoietic stem cells.

[0134] In some embodiments, the fusion proteins include a linker between the DNA binding domain (e.g., ZFN, TALE, or nCas9) and the BE domains. Linkers that can be used in these fusion proteins (or between fusion proteins in a concatenated structure) can include any sequence that does not interfere with the function of the fusion proteins. In preferred embodiments, the linkers are short, e.g., 2-20 amino acids, and are typically flexible (i.e., comprising amino acids with a high degree of freedom such as glycine, alanine, and serine). In some embodiments, the linker comprises one or more units consisting of GGGS (SEQ ID NO:135) or GGGGS (SEQ ID NO:136), e.g., two, three, four, or more repeats of the GGGS (SEQ ID NO:137) or GGGGS (SEQ ID NO:138) unit. Other linker sequences can also be used.

[0135] In some embodiments, the CGBE fusion protein includes a cell-penetrating peptide sequence that facilitates delivery to the intracellular space, e.g., HIV-derived TAT peptide, penetratins, transportans, or hCT derived cell-penetrating peptides, see, e.g., Caron et al., (2001) Mol Ther. 3(3):310-8; Langel, Cell-Penetrating Peptides: Processes and Applications (CRC Press, Boca Raton Fla. 2002); E1-Andaloussi et al., (2005) Curr Pharm Des. 11(28):3597-611; and Deshayes et al., (2005) Cell Mol Life Sci. 62(16):1839-49.

[0136] Cell penetrating peptides (CPPs) are short peptides that facilitate the movement of a wide range of biomolecules across the cell membrane into the cytoplasm or other organelles, e.g. the mitochondria and the nucleus. Examples of molecules that can be delivered by CPPs include therapeutic drugs, plasmid DNA, oligonucleotides, siRNA, peptide-nucleic acid (PNA), proteins, peptides, nanoparticles, and liposomes. CPPs are generally 30 amino acids or less, are derived from naturally or non-naturally occurring protein or chimeric sequences, and contain either a high relative abundance of positively charged amino acids, e.g. lysine or arginine, or an alternating pattern of polar and non-polar amino acids. CPPs that are commonly used in the art include Tat (Frankel et al., (1988) Cell. 55:1189-1193, Vives et al., (1997) J. Biol. Chem. 272:16010-16017), penetratin (Derossi et al., (1994) J. Biol. Chem. 269:10444-10450), polyarginine peptide sequences (Wender et al., (2000) Proc. Natl. Acad. Sci. USA 97:13003-13008, Futaki et al., (2001) J. Biol. Chem. 276:5836-5840), and transportan (Pooga et al., (1998) Nat. Biotechnol. 16:857-861).

[0137] CPPs can be linked with their cargo through covalent or non-covalent strategies. Methods for covalently joining a CPP and its cargo are known in the art, e.g. chemical cross-linking (Stetsenko et al., (2000) J. Org. Chem. 65:4900-4909, Gait et al. (2003) Cell. Mol. Life. Sci. 60:844-853) or cloning a fusion protein (Nagahara et al., (1998) Nat. Med. 4:1449-1453). Non-covalent coupling between the cargo and short amphipathic CPPs comprising polar and non-polar domains is established through electrostatic and hydrophobic interactions.

[0138] CPPs have been utilized in the art to deliver potentially therapeutic biomolecules into cells. Examples include cyclosporine linked to polyarginine for immunosuppression (Rothbard et al., (2000) Nature Medicine 6(11):1253-1257), siRNA against cyclin B1 linked to a CPP called MPG for inhibiting tumorigenesis (Crombez et al., (2007) Biochem Soc. Trans. 35:44-46), tumor suppressor p53 peptides linked to CPPs to reduce cancer cell growth (Takenobu et al., (2002) Mol. Cancer Ther. 1(12):1043-1049, Snyder et al., (2004) PLoS Biol. 2:E36), and dominant negative forms of Ras or phosphoinositol 3 kinase (PI3K) fused to Tat to treat asthma (Myou et al., (2003) J. Immunol. 171:4399-4405).

[0139] CPPs have been utilized in the art to transport contrast agents into cells for imaging and biosensing applications. For example, green fluorescent protein (GFP) attached to Tat has been used to label cancer cells (Shokolenko et al., (2005) DNA Repair 4(4):511-518). Tat conjugated to quantum dots have been used to successfully cross the blood-brain barrier for visualization of the rat brain (Santra et al., (2005) Chem. Commun. 3144-3146). CPPs have also been combined with magnetic resonance imaging techniques for cell imaging (Liu et al., (2006) Biochem. and Biophys. Res. Comm. 347(1):133-140). See also Ramsey and Flynn, Pharmacol Ther. 2015 Jul. 22. pii: S0163-7258(15)00141-2.

[0140] Alternatively or in addition, the CGBE fusion proteins can include a nuclear localization sequence, e.g., SV40 large T antigen NLS (PKKKRRV (SEQ ID NO:348)) and nucleoplasmin NLS (KRPAATKKAGQAKKKK (SEQ ID NO:349)). Other NLSs are known in the art; see, e.g., Cokol et al., EMBO Rep. 2000 Nov. 15; 1(5): 411-415; Freitas and Cunha, Curr Genomics. 2009 December; 10(8): 550-557.

[0141] In some embodiments, the CGBE fusion proteins include a moiety that has a high affinity for a ligand, for example GST, FLAG or hexahistidine sequences. Such affinity tags can facilitate the purification of recombinant CGBE fusion proteins.

[0142] The CGBE fusion proteins described herein can be used for altering the genome of a cell. The methods generally include expressing or contacting the CGBE fusion proteins in the cells; in versions using one or two Cas9s, the methods include using a guide RNA having a region complementary to a selected portion of the genome of the cell. Methods for selectively altering the genome of a cell are known in the art, see, e.g., U.S. Pat. No. 8,993,233; US 20140186958; U.S. Pat. No. 9,023,649; WO/2014/099744; WO 2014/089290; WO2014/144592; WO144288; WO2014/204578; WO2014/152432; WO2115/099850; U.S. Pat. No. 8,697,359; US20160024529; US20160024524; US20160024523; US20160024510; US20160017366; US20160017301; US20150376652; US20150356239; US20150315576; US20150291965; US20150252358; US20150247150; US20150232883; US20150232882; US20150203872; US20150191744; US20150184139; US20150176064; US20150167000; US20150166969; US20150159175; US20150159174; US20150093473; US20150079681; US20150067922; US20150056629; US20150044772; US20150024500; US20150024499; US20150020223; US20140356867; US20140295557; US20140273235; US20140273226; US20140273037; US20140189896; US20140113376; US20140093941; US20130330778; US20130288251; US20120088676; US20110300538; US20110236530; US20110217739; US20110002889; US20100076057; US20110189776; US20110223638; US20130130248; US20150050699; US20150071899; US20150050699; US20150045546; US20150031134; US20150024500; US20140377868; US20140357530; US20140349400; US20140335620; US20140335063; US20140315985; US20140310830; US20140310828; US20140309487; US20140304853; US20140298547; US20140295556; US20140294773; US20140287938; US20140273234; US20140273232; US20140273231; US20140273230; US20140271987; US20140256046; US20140248702; US20140242702; US20140242700; US20140242699; US20140242664; US20140234972; US20140227787; US20140212869; US20140201857; US20140199767; US20140189896; US20140186958; US20140186919; US20140186843; US20140179770; US20140179006; US20140170753; WO/2008/108989; WO/2010/054108; WO/2012/164565; WO/2013/098244; WO/2013/176772; US 20150071899; Makarova et al., “Evolution and classification of the CRISPR-Cas systems” 9(6) Nature Reviews Microbiology 467-477 (1-23) (June 2011); Wiedenheft et al., “RNA-guided genetic silencing systems in bacteria and archaea” 482 Nature 331-338 (Feb. 16, 2012); Gasiunas et al., “Cas9-crRNA ribonucleoprotein complex mediates specific DNA cleavage for adaptive immunity in bacteria” 109(39) Proceedings of the National Academy of Sciences USA E2579-E2586 (Sep. 4, 2012); Jinek et al., “A Programmable Dual-RNA-Guided DNA Endonuclease in Adaptive Bacterial Immunity” 337 Science 816-821 (Aug. 17, 2012); Carroll, “A CRISPR Approach to Gene Targeting” 20(9) Molecular Therapy 1658-1660 (September 2012); U.S. Appl. No. 61/652,086, filed May 25, 2012; Al-Attar et al., Clustered Regularly Interspaced Short Palindromic Repeats (CRISPRs): The Hallmark of an Ingenious Antiviral Defense Mechanism in Prokaryotes, Biol Chem. (2011) vol. 392, Issue 4, pp. 277-289; Hale et al., Essential Features and Rational Design of CRISPR RNAs That Function With the Cas RAMP Module Complex to Cleave RNAs, Molecular Cell, (2012) vol. 45, Issue 3, 292-302.

[0143] For methods in which the CGBE fusion proteins are delivered to cells, the proteins can be produced using any method known in the art, e.g., by in vitro translation, or expression in a suitable host cell from nucleic acid encoding the CGBE fusion protein; a number of methods are known in the art for producing proteins. For example, the proteins can be produced in and purified from yeast, E. coli, insect cell lines, plants, transgenic animals, or cultured mammalian cells; see, e.g., Palomares et al., “Production of Recombinant Proteins: Challenges and Solutions,” Methods Mol Biol. 2004; 267:15-52. In addition, the CGBE fusion proteins can be linked to a moiety that facilitates transfer into a cell, e.g., a lipid nanoparticle, optionally with a linker that is cleaved once the protein is inside the cell. See, e.g., LaFountaine et al., Int J Pharm. 2015 Aug. 13; 494(1):180-194.

### Expression Systems

[0144] To use the CGBE fusion proteins described herein, it may be desirable to express them from a nucleic acid that encodes them. This can be performed in a variety of ways. For example, the nucleic acid encoding the CGBE fusion can be cloned into an intermediate vector for transformation into prokaryotic or eukaryotic cells for replication and/or expression. Intermediate vectors are typically prokaryote vectors, e.g., plasmids, or shuttle vectors, or insect vectors, for storage or manipulation of the nucleic acid encoding the CGBE fusion for production of the CGBE fusion protein. The nucleic acid encoding the CGBE fusion protein can also be cloned into an expression vector, for administration to a plant cell, animal cell, preferably a mammalian cell or a human cell, fungal cell, bacterial cell, or protozoan cell.

[0145] To obtain expression, a sequence encoding a CGBE fusion protein is typically subcloned into an expression vector that contains a promoter to direct transcription. Suitable bacterial and eukaryotic promoters are well known in the art and described, e.g., in Sambrook et al., Molecular Cloning, A Laboratory Manual (3d ed. 2001); Kriegler, Gene Transfer and Expression: A Laboratory Manual (1990); and Current Protocols in Molecular Biology (Ausubel et al., eds., 2010). Bacterial expression systems for expressing the engineered protein are available in, e.g., E. coli, Bacillus sp., and Salmonella (Palva et al., 1983, Gene 22:229-235). Kits for such expression systems are commercially available. Eukaryotic expression systems for mammalian cells, yeast, and insect cells are well known in the art and are also commercially available.

[0146] The promoter used to direct expression of a nucleic acid depends on the particular application. For example, a strong constitutive promoter is typically used for expression and purification of fusion proteins. In contrast, when the CGBE fusion protein is to be administered in vivo for gene regulation, either a constitutive or an inducible promoter can be used, depending on the particular use of the CGBE fusion protein. In addition, a preferred promoter for administration of the CGBE fusion protein can be a weak promoter, such as HSV TK or a promoter having similar activity. The promoter can also include elements that are responsive to transactivation, e.g., hypoxia response elements, Gal4 response elements, lac repressor response element, and small molecule control systems such as tetracycline-regulated systems and the RU-486 system (see, e.g., Gossen & Bujard, 1992, Proc. Natl. Acad. Sci. USA, 89:5547; Oligino et al., 1998, Gene Ther., 5:491-496; Wang et al., 1997, Gene Ther., 4:432-441; Neering et al., 1996, Blood, 88:1147-55; and Rendahl et al., 1998, Nat. Biotechnol., 16:757-761).

[0147] In addition to the promoter, the expression vector typically contains a transcription unit or expression cassette that contains all the additional elements required for the expression of the nucleic acid in host cells, either prokaryotic or eukaryotic. A typical expression cassette thus contains a promoter operably linked, e.g., to the nucleic acid sequence encoding the CGBE fusion protein, and any signals required, e.g., for efficient polyadenylation of the transcript, transcriptional termination, ribosome binding sites, or translation termination. Additional elements of the cassette may include, e.g., enhancers, and heterologous spliced intronic signals.

[0148] The particular expression vector used to transport the genetic information into the cell is selected with regard to the intended use of the CGBE fusion protein, e.g., expression in plants, animals, bacteria, fungus, protozoa, etc. Standard bacterial expression vectors include plasmids such as pBR322 based plasmids, pSKF, pET23D, and commercially available tag-fusion expression systems such as GST and LacZ.

[0149] Expression vectors containing regulatory elements from eukaryotic viruses are often used in eukaryotic expression vectors, e.g., SV40 vectors, papilloma virus vectors, and vectors derived from Epstein-Barr virus. Other exemplary eukaryotic vectors include pMSG, pAV009/A+, pMTO10/A+, pMAMneo-5, baculovirus pDSVE, and any other vector allowing expression of proteins under the direction of the SV40 early promoter, SV40 late promoter, metallothionein promoter, murine mammary tumor virus promoter, Rous sarcoma virus promoter, polyhedrin promoter, or other promoters shown effective for expression in eukaryotic cells.

[0150] The vectors for expressing the CGBE fusion protein can include RNA Pol III promoters to drive expression of the guide RNAs, e.g., the H1, U6 or 7SK promoters. These human promoters allow for expression of CGBE fusion protein in mammalian cells following plasmid transfection.

[0151] Some expression systems have markers for selection of stably transfected cell lines such as thymidine kinase, hygromycin B phosphotransferase, and dihydrofolate reductase. High yield expression systems are also suitable, such as using a baculovirus vector in insect cells, with the gRNA encoding sequence under the direction of the polyhedrin promoter or other strong baculovirus promoters.

[0152] The elements that are typically included in expression vectors also include a replicon that functions in E. coli, a gene encoding antibiotic resistance to permit selection of bacteria that harbor recombinant plasmids, and unique restriction sites in nonessential regions of the plasmid to allow insertion of recombinant sequences.

[0153] Standard transfection methods are used to produce bacterial, mammalian, yeast or insect cell lines that express large quantities of protein, which are then purified using standard techniques (see, e.g., Colley et al., 1989, J. Biol. Chem., 264:17619-22; Guide to Protein Purification, in Methods in Enzymology, vol. 182 (Deutscher, ed., 1990)). Transformation of eukaryotic and prokaryotic cells are performed according to standard techniques (see, e.g., Morrison, 1977, J. Bacteriol. 132:349-351; Clark-Curtiss & Curtiss, Methods in Enzymology 101:347-362 (Wu et al., eds, 1983).

[0154] Any of the known procedures for introducing foreign nucleotide sequences into host cells may be used. These include the use of calcium phosphate transfection, polybrene, protoplast fusion, electroporation, nucleofection, liposomes, microinjection, naked DNA, plasmid vectors, viral vectors, both episomal and integrative, and any of the other well-known methods for introducing cloned genomic DNA, cDNA, synthetic DNA or other foreign genetic material into a host cell (see, e.g., Sambrook et al., supra). It is only necessary that the particular genetic engineering procedure used be capable of successfully introducing at least one gene into the host cell capable of expressing the CGBE fusion protein.

[0155] In methods wherein the fusion proteins include a Cas9 domain, the methods also include delivering at least one gRNA that interacts with the Cas9, or a nucleic acid that encodes a gRNA.

[0156] Alternatively, the methods can include delivering the CGBE fusion protein and guide RNA together, e.g., as a complex. For example, the CGBE fusion protein and gRNA can be can be overexpressed in a host cell and purified, then complexed with the guide RNA (e.g., in a test tube) to form a ribonucleoprotein (RNP), and delivered to cells. In some embodiments, the CGBE fusion protein can be expressed in and purified from bacteria through the use of bacterial expression plasmids. For example, His-tagged CGBE fusion protein can be expressed in bacterial cells and then purified using nickel affinity chromatography. The use of RNPs circumvents the necessity of delivering plasmid DNAs encoding the nuclease or the guide, or encoding the nuclease as an mRNA. RNP delivery may also improve specificity, presumably because the half-life of the RNP is shorter and there's no persistent expression of the nuclease and guide (as you′d get from a plasmid). The RNPs can be delivered to the cells in vivo or in vitro, e.g., using lipid-mediated transfection or electroporation. See, e.g., Liang et al. “Rapid and highly efficient mammalian cell engineering via Cas9 protein transfection.” Journal of biotechnology 208 (2015): 44-53; Zuris, John A., et al. “Cationic lipid-mediated delivery of proteins enables efficient protein-based genome editing in vitro and in vivo.” Nature biotechnology 33.1 (2015): 73-80; Kim et al. “Highly efficient RNA-guided genome editing in human cells via delivery of purified Cas9 ribonucleoproteins.” Genome research 24.6 (2014): 1012-1019.

[0157] The present invention also includes the vectors and cells comprising the vectors, as well as kits comprising the proteins and nucleic acids described herein, e.g., for use in a method described herein.

### Methods of Use

[0158] The base editors described herein can be used to generate transversion mutations—i.e., C-to-G mutations—in a nucleic acid sequence, e.g., in a cell, e.g., a cell in an animal (e.g., a mammal such as a human or veterinary subject), or a synthetic nucleic acid substrate. The methods include contacting the nucleic acid with a base editor as described herein. Where the base editor includes a CRISPR Cas9 or Cas12a protein, the methods further include the use of one or more guide RNAs that direct binding of the base editor to a sequence to be deaminated.

[0159] For example, the base editors described herein can be used for in vitro, in vivo or in situ directed evolution, e.g., to engineer polypeptides or proteins based on a synthetic selection framework, e.g. antibiotic resistance in E. coli or resistance to anti-cancer therapeutics being assayed in mammalian cells (e.g. CRISPR-X Hess et al, PMID: 27798611 or BE-plus systems Jiang et al, PMID: 29875396).

### Tables

TABLE A
Exemplary APOBEC1 proteins. This table lists (in
alphabetical order) important APOBEC1 homologues.

| | | Uniprot | | Seq |
|---|---|---|---|---|
| APOBEC1 | | accession | | ID |
| orthologue | Species | number | Version number | NO: |
| African elephant | Loxodonta | G3U0R4 | version 30 of the entry | 1 |
| | africana | | and version 1 of the | |
| | | | sequence | |
| African lungfish | Protopterus | A0A0M3N0G8 | version 4 of the entry | 2 |
| | annectens | | and version 1 of the | |
| | | | sequence | |
| American alligator | Alligator | A0A151P6M4 | version 9 of the entry | 3 |
| | mississippiensis | | and version 1 of the | |
| | | | sequence | |
| American | Anolis | F1CGT0 | version 16 of the entry | 4 |
| chameleon | carolinensis | | and version 1 of the | |
| | | | sequence | |
| American crow | Corvus | A0A091EQ78 | version 8 of the entry | 5 |
| | brachyrhynchos | | and version 1 of the | |
| | | | sequence | |
| Anna's | Calypte anna | A0A091IIG0 | version 9 of the entry | 6 |
| hummingbird | | | and version 1 of the | |
| | | | sequence | |
| Atlantic bottle- | Tursiops | A0A2U4ALA1 | version 2 of the entry | 7 |
| nosed dolphin | truncatus | | and version 1 of the | |
| | | | sequence | |
| Barn owl | Tyto alba | A0A093FY71 | version 6 of the entry | 8 |
| | | | and version 1 of the | |
| | | | sequence | |
| Black flying fox | Pteropus alecto | L5KGJ8 | version 13 of the entry | 9 |
| | | | and version 1 of the | |
| | | | sequence | |
| Black snub-nosed | Rhinopithecus | A0A2K6KS69 | version 5 of the entry | 10 |
| monkey | bieti | | and version 1 of the | |
| | | | sequence | |
| Beluga whale | Delphlnapterus | A0A2Y9NGP5 | version 1 of the entry | 11 |
| | leucas | | and version 1 of the | |
| | | | sequence | |
| Bengalese finch | Lonchura striata | A0A218ULD2 | version 3 of the entry | 12 |
| | domestica | | and version 1 of the | |
| | | | sequence | |
| Blue-fronted | Amazona | A0A0Q3WRD0 | version 5 of the entry | 13 |
| Amazon parrot | aestiva | | and version 1 of the | |
| | | | sequence | |
| Bolivian squirrel | Saimiri | A0A2K6U925 | version 5 of the entry | 14 |
| monkey | boliviensis | | and version 1 of the | |
| | boliviensis | | sequence | |
| Bonobo | Pan paniscus | A0A2R9A0R0 | version 2 of the entry | 15 |
| | | | and version 1 of the | |
| | | | sequence | |
| Bornean | Pongo | Q694B3 | version 60 of the entry | 16 |
| orangutan | pygmaeus | | and version 2 of the | |
| | | | sequence | |
| Bovine | Bos taurus | E1BP99 | version 40 of the entry | 17 |
| | | | and version 1 of the | |
| | | | sequence | |
| Brandt's bat | Myotis brandtii | S7PYX0 | version 9 of the entry | 18 |
| | | | and version 1 of the | |
| | | | sequence | |
| Cat | Felis catus | M3WB96 | version 31 of the entry | 19 |
| | | | and version 2 of the | |
| | | | sequence | |
| Cebus capucinus | Cebus capucinus | A0A2K5PZC0 | version 5 of the entry | 20 |
| imitator | imitator | | and version 1 of the | |
| | | | sequence | |
| Chimpanzee | Pan troglodytes | H2Q5C6 | version 32 of the entry | 21 |
| | | | and version 1 of the | |
| | | | sequence | |
| Chinese alligator | Alligator | A0A1U7S7K7 | version 5 of the entry | 22 |
| | sinensis | | and version 1 of the | |
| | | | sequence | |
| Chinese hamster | Cricetulus | G3I1S7 | version 15 of the entry | 23 |
| | griseus | | and version 1 of the | |
| | | | sequence | |
| Chuck-will's- | Antrostomus | A0A094MFH1 | version 10 of the entry | 24 |
| widow | carolinensis | | and version 1 of the | |
| | | | sequence | |
| Coquerel's sifaka | Propithecus | A0A2K6EVT9 | version 5 of the entry | 25 |
| | coquereli | | and version 1 of the | |
| | | | sequence | |
| Crab-eating | Macaca | G8F4P7 | version 11 of the entry | 26 |
| macaque | fascicularis | | and version 1 of the | |
| | | | sequence | |
| Crested ibis | Nipponia | A0A091V7F8 | version 9 of the entry | 27 |
| | nippon | | and version 1 of the | |
| | | | sequence | |
| Dalmatian pelican | Pelecanus | A0A091SSF0 | version 8 of the entry | 28 |
| | crispus | | and version 1 of the | |
| | | | sequence | |
| Damaraland mole | Fukomys | A0A091CVE5 | version 9 of the entry | 29 |
| rat | damarensis | | and version 1 of the | |
| | | | sequence | |
| David's myotis | Myotis davidii | L5LUG3 | version 11 of the entry | 30 |
| | | | and version 1 of the | |
| | | | sequence | |
| Dog | Canis lupus | F1PUJ5 | version 41 of the entry | 31 |
| | familiaris | | and version 2 of the | |
| | | | sequence | |
| Downy | Dryobates | A0A093GVH6 | version 9 of the entry | 32 |
| woodpecker | pubescens | | and version 1 of the | |
| | | | sequence | |
| Drill | Mandrillus | A0A2K5Z8Y4 | version 4 of the entry | 33 |
| | leucophaeus | | and version 1 of the | |
| | | | sequence | |
| East African grey | Balearica | A0A087VMP5 | version 8 of the entry | 34 |
| crowned-crane | regulorum | | and version 1 of the | |
| | gibbericeps | | sequence | |
| Emperor penguin | Aptenodytes | A0A087QNJ5 | version 8 of the entry | 35 |
| | forsteri | | and version 1 of the | |
| | | | sequence | |
| Enhydra lutris | Enhydra lutris | A0A2Y9IYV0 | version 1 of the entry | 36 |
| kenyoni | kenyoni | | and version 1 of the | |
| | | | sequence | |
| European | Mustela | B2NIW5 | version 34 of the entry | 37 |
| domestic ferret | putorius furo | | and version 1 of the | |
| | | | sequence | |
| Florida manatee | Trichechus | A0A2Y9E587 | version 1 of the entry | 38 |
| | manatus | | and version 1 of the | |
| | latirostris | | sequence | |
| Giant panda | Ailuropoda | G1LKL4 | version 27 of the entry | 39 |
| | melanoleuca | | and version 1 of the | |
| | | | sequence | |
| Golden-collared | Manacus | A0A093PWR2 | version 8 of the entry | 40 |
| manakin | vitellinus | | and version 1 of the | |
| | | | sequence | |
| Golden hamster | Mesocricetus | Q9EQP0 | version 73 of the entry | 41 |
| | auratus | | and version 1 of the | |
| | | | sequence | |
| Golden snub- | Rhinopithecus | A0A2K6PRF3 | version 4 of the entry | 42 |
| nosed monkey | roxellana | | and version 1 of the | |
| | | | sequence | |
| Green monkey | Chlorocebus | A0A0D9RBS4 | version 11 of the entry | 43 |
| | sabaeus | | and version 1 of the | |
| | | | sequence | |
| Guinea pig | Cavia porcellus | A0A286XNR2 | version 5 of the entry | 44 |
| | | | and version 1 of the | |
| | | | sequence | |
| Hawaiian monk | Neomonachus | A0A2Y9HAT6 | version 1 of the entry | 45 |
| seal | schauinslandi | | and version 1 of the | |
| | | | sequence | |
| Hoatzin | Opisthocomus | A0A091XJL0 | version 8 of the entry | 46 |
| | hoazin | | and version 1 of the | |
| | | | sequence | |
| Horse | Equus ferus | F6WR88 | version 28 of the entry | 47 |
| | caballus | | and version 1 of the | |
| | | | sequence | |
| Human | Homo sapiens | P41238 | version 166 of the entry | 48 |
| | | | and version 3 of the | |
| | | | sequence | |
| Kea | Nestor notabilis | A0A091RU17 | version 8 of the entry | 49 |
| | | | and version 1 of the | |
| | | | sequence | |
| Little egret | Egretta garzetta | A0A091IWL9 | version 10 of the entry | 50 |
| | | | and version 1 of the | |
| | | | sequence | |
| Ma's night | Aotus | A0A2K5DG70 | version 6 of the entry | 51 |
| monkey | nancymaae | | and version 1 of the | |
| | | | sequence | |
| Mouse | Mus musculus | P51908 | version 150 of the entry | 52 |
| | | | and version 1 of the | |
| | | | sequence | |
| Naked mole rat | Heterocephalus | G5BPM8 | version 16 of the entry | 53 |
| | glaber | | and version 1 of the | |
| | | | sequence | |
| Northern carmine | Merops nubicus | A0A091QEK6 | version 8 of the entry | 54 |
| bee-eater | | | and version 1 of the | |
| | | | sequence | |
| Northern fulmar | Fulmarus | A0A093LP85 | version 9 of the entry | 55 |
| | glacialis | | and version 1 of the | |
| | | | sequence | |
| Northern white- | Nomascus | G1QZV0 | version 31 of the entry | 56 |
| cheeked gibbon | leucogenys | | and version 1 of the | |
| | | | sequence | |
| Olive baboon | Papio anubis | A0A096MWB4 | version 19 of the entry | 57 |
| | | | and version 2 of the | |
| | | | sequence | |
| Gray short-tailed | Monodelphis | Q9TUI7 | version 101 of the entry | 58 |
| Opossum | domestica | | and version 1 of the | |
| | | | sequence | |
| Ord's kangaroo | Dipodomys ordii | A0A1S3FTE2 | version 3 of the entry | 59 |
| rat | | | and version 1 of the | |
| | | | sequence | |
| Pacific walrus | Odobenus | A0A2U3WPA5 | version 2 of the entry | 60 |
| | rosmarus | | and version 1 of the | |
| | divergens | | sequence | |
| Patagioenas | Patagioenas | A0A1V4JAP2 | version 3 of the entry | 61 |
| fasciata monilis | fasciata monilis | | and version 1 of the | |
| | | | sequence | |
| Peters' Angolan | Colobus | A0A2K5JKV4 | version 4 of the entry | 62 |
| colobus | angolensis | | and version 1 of the | |
| | palliatus | | sequence | |
| Philippine tarsier | Tarsius syrichta | A0A1U7U8J6 | version 3 of the entry | 63 |
| | | | and version 1 of the | |
| | | | sequence | |
| Pig | Sus scrofa | F1SLW4 | version 37 of the entry | 64 |
| | | | and version 2 of the | |
| | | | sequence | |
| Pig-tailed | Macaca | A0A2K6BGI5 | version 4 of the entry | 65 |
| macaque | nemestrina | | and version 1 of the | |
| | | | sequence | |
| Rabbit | Oryctolagus | P47855 | version 96 of the entry | 66 |
| | cuniculus | | and version 1 of the | |
| | | | sequence | |
| Rat | Rattus | P38483 | version 137 of the entry | 67 |
| | norvegicus | | and version 1 of the | |
| | | | sequence | |
| Red-legged | Cariama | A0A091M4D7 | version 10 of the entry | 68 |
| seriema | cristata | | and version 1 of the | |
| | | | sequence | |
| Red throated | Gavia stellata | A0A093F3R4 | version 8 of the entry | 69 |
| diver | | | and version 1 of the | |
| | | | sequence | |
| Rhesus macaque | Macaca mulatta | G7N5W0 | version 19 of the entry | 70 |
| | | | and version 1 of the | |
| | | | sequence | |
| Rifleman | Acanthisitta | A0A091MEP8 | version 8 of the entry | 71 |
| (Acanthisitta | chloris | | and version 1 of the | |
| chloris) | | | sequence | |
| Rock dove | Columba livia | A0A2I0LXZ8 | version 3 of the entry | 72 |
| | | | and version 1 of the | |
| | | | sequence | |
| Sheep | Ovis aries | W5NVH9 | version 19 of the entry | 73 |
| | | | and version 1 of the | |
| | | | sequence | |
| Small-eared | Otolemur | H0XVG8 | version 27 of the entry | 74 |
| galago | gamettii | | and version 1 of the | |
| (Garnett's greater | | | sequence | |
| bushbaby) | | | | |
| Smooth | Stylophora | A0A2B4RXQ3 | version 4 of the entry | 75 |
| cauliflower coral | pistillata | | and version 1 of the | |
| | | | sequence | |
| Sooty mangabey | Cercocebus | A0A2K5L2J6 | version 5 of the entry | 76 |
| | atys | | and version 1 of the | |
| | | | sequence | |
| Sperm whale | Physeter | A0A2Y9T649 | version 1 of the entry | 77 |
| | macrocephalus | | and version 1 of the | |
| | | | sequence | |
| Sumatran | Pongo abelii | H2NGD0 | version 24 of the entry | 78 |
| orangutan | | | and version 1 of the | |
| | | | sequence. | |
| Sunbittern | Eurypyga helias | A0A093JI54 | version 8 of the entry | 79 |
| | | | and version 1 of the | |
| | | | sequence | |
| Tasmanian devil | Sarcophilus | G3W4I1 | version 32 of the entry | 80 |
| | harrisii | | and version 1 of the | |
| | | | sequence | |
| Weddell seal | Leptonychotes | A0A2U3Y3M5 | version 2 of the entry | 81 |
| | weddellii | | and version 1 of the | |
| | | | sequence | |
| Western | Erinaceus | A0A1S3AN78 | version 3 of the entry | 82 |
| European | europaeus | | and version 1 of the | |
| hedgehog | | | sequence | |
| White-tailed sea- | Haliaeetus | A0A091PSV3 | version 8 of the entry | 83 |
| eagle | albicilla | | and version 1 of the | |
| | | | sequence | |
| White tufted ear | Callithrix | F7F6M6 | version 31 of the entry | 84 |
| marmoset | jacchus | | and version 2 of the | |
| | | | sequence | |
| Wild yak | Bos mutus | L8IDZ0 | version 15 of the entry | 85 |
| | | | and version 1 of the | |
| | | | sequence | |
| Yellow-throated | Pterocles | A0A093CIQ8 | version 5 of the entry | 86 |
| sandgrouse | gutturalis | | and version 1 of the | |
| | | | sequence | |

TABLE B
Exemplary APOBEC/AID family proteins. The following table lists
(in alphabetical order) exemplary APOBEC family homologues.

| APOBEC/AID | Uniprot | | |
|---|---|---|---|
| family | accession | | Seq. |
| homologue | number | Version number | ID |
| Rat APOBEC1 | P38483 | version 137 of the entry | 67 |
| | | and version 1 of the | |
| | | sequence | |
| Human AID | Q9GZX7 | version 155 of the entry | 87 |
| (AICDA) | | and version 1 of the | |
| | | sequence | |
| Human | P41238 | version 166 of the entry | 48 |
| APOBEC1 | | and version 3 of the | |
| | | sequence | |
| Human | Q9Y235 | version 132 of the entry | 88 |
| APOBEC2 | | and version 1 of the | |
| | | sequence | |
| Human | P31941 | version 160 of the entry | 89 |
| APOBEC3A | | and version 3 of the | |
| | | sequence | |
| Human | Q9UH17 | version 150 of the entry | 90 |
| APOBEC3B | | and version 1 of the | |
| | | sequence | |
| Human | Q9NRW3 | version 147 of the entry | 91 |
| APOBEC3C | | and version 2 of the | |
| | | sequence | |
| Human | Q96AK3 | version 127 of the entry | 92 |
| APOBEC3D | | and version 1 of the | |
| | | sequence | |
| Human | Q8IUX4 | version 143 of the entry | 93 |
| APOBEC3F | | and version 3 of the | |
| | | sequence | |
| Human | Q9HC16 | version 168 of the entry | 94 |
| APOBEC3G | | and version 1 of the | |
| | | sequence | |
| Human | Q6NTF7 | version 115 of the entry | 95 |
| APOBEC3H | | and version 4 of the | |
| | | sequence | |
| Petromyzon | NCBI Genbank: | Version 1 of the entry, | 96 |
| marinus cytosine | ABO15149.1 | accession EF094822.1 | |
| deaminase | Uniprot: A5H718 | | |
| (pmCDA1) | | | |
| Petromyzon | Same sequence | — | 97 |
| marinus cytosine | as ID 96, but | | |
| deaminase | with R187W | | |
| (pmCDA1) | mutation | | |

TABLE C
Exemplary TadA proteins. Some or all residues listed
in Table A as well as combinations thereof might
also be introduced in any of these TadA orthologues
or tRNA adenosine deaminase homologues (see FIG.
5 for alignments of these TadA proteins).

| tRNA-specific | Uniprot | | |
|---|---|---|---|
| adenosine | accession | Sequence | Seq. |
| deaminase | number | version # | ID |
| E. coli TadA | P68398 | 2 | 98 |
| S. aureus TadA | Q99W51 | 1 | 99 |
| S. pyogenes TadA | Q5XE14 | 2 | 100 |
| S. typhi TadA | Q8XGY4 | 2 | 101 |
| A. aeolicus TadA | O67050 | 1 | 102 |
| S. pombe TAD2 | O94642 | 2 | 103 |
| S. cerevisiae TAD1 | P53065 | 1 | 104 |
| S. cerevisiae TAD2 | P47058 | 1 | 105 |
| A. thaliana TAD2 | Q6IDB6 | 1 | 106 |
| X. laevis ADAT2 | Q4V7V8 | 1 | 107 |
| X. tropicalis ADAT2 | Q0P4H0 | 1 | 108 |
| D. rerio ADAT2 | Q5RIV4 | 2 | 109 |
| B. taurus ADAT2 | Q5E9J7 | 1 | 110 |
| M. musculus ADAT2 | Q6P6J0 | 1 | 111 |
| H. sapiens ADAT2 | Q7Z6V5 | 1 | 112 |

TABLE D
Specific codons and amino acid modifications that are actionable with CGBE. Listing
potential codon changes, as well as amino acid modifications that can be induced by
CGBE. WT = wild type; AA = amino acid; = same AA also included in potential outcome.

| wt | wt | codon mutations, | AA mutations, | codon mutations, | AA mutations, |
|---|---|---|---|---|---|
| codon | AA | C-to-G | C-to-G | G-to-C | G-to-C |
| AAA | K | AAA | = | AAA | = |
| AAC | N | AAG | N > K | AAC | = |
| AAG | K | AAG | = | AAC | K > N |
| AAT | N | AAT | = | AAT | = |
| ACA | T | AGA | T > R | ACA | = |
| ACC | T | AGG, AGC, ACG | T > R, T > S, = | ACC | = |
| ACG | T | AGG | T > R | ACC | = |
| ACT | T | AGT | T > S | ACT | = |
| AGA | R | AGA | = | ACA | R > T |
| AGC | S | AGG | S > R | ACC | S > T |
| AGG | R | AGG | = | ACC, ACG, AGC | R > T, R > S |
| AGT | S | AGT | = | ACT | S > T |
| ATA | I | ATA | = | ATA | = |
| ATC | I | ATG | I > M | ATC | = |
| ATG | M | ATG | = | ATC | M > I |
| ATT | I | ATT | = | ATT | = |
| CAA | Q | GAA | Q > E | CAA | = |
| CAC | H | GAG, GAC, CAG | H > E, H > D, H > Q | CAC | = |
| CAG | Q | GAG | Q > E | CAC | Q > H |
| CAT | H | GAT | H > D | CAT | = |
| CCA | P | GGA, GCA, CGA | P > G, P > A, P > R | CCA | = |
| CCC | P | GGG, GCC, CGC, | P > G, P > A, | CCC | = |
| | | CCG, GGC, CGG, | P > R, = | | |
| | | GCG | | | |
| CCG | P | GGG, GCG, CGG | P > G, P > A, P > R | CCC | = |
| CCT | P | GGT, GCT, CGT | P > G, P > A, P > R | CCT | = |
| CGA | R | GGA | R > G | CCA | R > P |
| CGC | R | GGG, GGC, CGG | R > G, = | CCC | R > P |
| CGG | R | GGG | R > G | CCC, CCG, CGC | R > P, = |
| CGT | R | GGT | R > G | CCT | R > P |
| CTA | L | GTA | L > V | CTA | = |
| CTC | L | GTG, GTC, CTG | L > V, = | CTC | = |
| CTG | L | GTG | L > V | CTC | = |
| CTT | L | GTT | L > V | CTT | = |
| GAA | E | GAA | = | CAA | E > Q |
| GAC | D | GAG | D > E | CAC | D > H |
| GAG | E | GAG | = | CAC, CAG, GAC | E > H, E > Q, E > D |
| GAT | D | GAT | = | CAT | D > H |
| GCA | A | GGA | A > G | CCA | A > P |
| GCC | A | GGG, GGC, GCG | A > G, = | CCC | A > P |
| GCG | A | GGG | A > G | CCC, CCG, GCC | A > P, = |
| GCT | A | GGT | A > G | CCT | A > P |
| GGA | G | GGA | = | CCA, CGA, GCA | G > P, G > R, G > A |
| GGC | G | GGG | = | CCC, CGC, GCC | G > P, G > R, G > A |
| GGG | G | GGG | = | CCC, CGG, GCG, | G > P, G > R, |
| | | | | GGC, CCG, GCC, | G > A, = |
| | | | | CGC | |
| GGT | G | GGT | = | CCT, CGT, GCT | G > P, G > R, G > A |
| GTA | V | GTA | = | CTA | V > L |
| GTC | V | GTG | = | CTC | V > L |
| GTG | V | GTG | = | CTC, CTG, GTC | V > L, = |
| GTT | V | GTT | = | CTT | V > L |
| TAA | * | TAA | = | TAA | = |
| TAC | Y | TAG | Y > * | TAC | = |
| TAG | * | TAG | = | TAC | * > Y |
| TAT | Y | TAT | = | TAT | = |
| TCA | S | TGA | S > * | TCA | = |
| TCC | S | TGG, TGC, TCG | S > W, S > C, = | TCC | = |
| TCG | S | TGG | S > W | TCC | = |
| TCT | S | TGT | S > C | TCT | = |
| TGA | * | TGA | = | TCA | * > S |
| TGC | C | TGG | C > W | TCC | C > S |
| TGG | W | TGG | = | TCC, TCG, TGC | W > S, W > C |
| TGT | C | TGT | = | TCT | C > S |
| TTA | L | TTA | = | TTA | = |
| TTC | F | TTG | F > L | TTC | = |
| TTG | L | TTG | = | TTC | L > F |
| TTT | F | TTT | = | TTT | = |

TABLE E1
Specific targetable mutations from the ClinVar database that can be
corrected with CGBE using Cas9 proteins with NGG-PAM recognition.

| snpId | name | geneId | phenotypeList |
|---|---|---|---|
| 121908088 | C > G | 7173\|TPO | Deficiency of iodide peroxidase, not provided |
| 143367518 | C > G | 1161\|ERCC8 | Cockayne syndrome type A, not provided |
| 74953290 | C > G | 324\|APC | Hereditary cancer-predisposing syndrome, not |
| | | | provided, not specified |
| 201732356 | C > G | 5428\|POLG | not provided |
| 587783598 | C > G | 1785\|DNM2 | Myopathy, centronuclear, not provided |
| 879254375 | C > G | 3949\|LDLR | Familial hypercholesterolemia |
| 752596535 | C > G | 3949\|LDLR | Familial hypercholesterolemia |
| 121908725 | C > G | 100\|ADA | Severe combined immunodeficiency due to ADA |
| | | | deficiency, not provided |
| 587777526 | C > G | 23394\|ADNP | Helsmoortel-van der aa syndrome, Inborn genetic |
| | | | diseases, not provided |
| 398123527 | G > C | 2629\|GBA | Gaucher disease, Gaucher's disease, type 1 |
| 794728589 | G > C | 4000\|LMNA | Primary dilated cardiomyopathy, not provided |
| 267607570 | G > C | 4000\|LMNA | Cardiovascular phenotype, Charcot-Marie-Tooth |
| | | | disease, type 2, Dilated cardiomyopathy 1A, not |
| | | | provided |
| 1167218743 | G > C | 3030\|HADHA | Long-chain 3-hydroxyacyl-CoA dehydrogenase |
| | | | deficiency, Long-chain 3-hydroxyacyl-CoA |
| | | | dehydrogenase deficiency, Mitochondrial trifunctional |
| | | | protein deficiency |
| 727504799 | G > C | 7273\|TTN | Cardiomyopathy, Primary dilated cardiomyopathy |
| 767978961 | G > C | 729920\|CRPPA | Congenital muscular dystrophy-dystroglycanopathy |
| | | | with brain and eye anomalies, type A7, Muscular |
| | | | dystrophy-dystroglycanopathy (limb-girdle), type |
| | | | c, 7, not provided |
| 1325951163 | G > C | 673\|BRAF | Global developmental delay, not provided |
| 398123181 | G > C | 2592\|GALT | Deficiency of UDPglucose-hexose-1-phosphate |
| | | | uridylyltransferase, not provided |
| 137853150 | G > C | 10312\|TCIRG1 | Osteopetrosis autosomal recessive 1 |
| 759520465 | G > C | 472\|ATM | Ataxia-telangiectasia syndrome, Hereditary cancer- |
| | | | predisposing syndrome, not provided |
| 539407162 | G > C | 89910\|UBE3B | Inborn genetic diseases, Kaufman oculocerebrofacial |
| | | | syndrome |
| 63750473 | G > C | 368\|ABCC6 | Pseudoxanthoma elasticum, not provided |
| 397516354 | G > C | 7137\|TNNI3 | Hypertrophic cardiomyopathy, Primary familial |
| | | | hypertrophic cardiomyopathy |

TABLE E2
Specific targetable mutations from the ClinVar database that can be
corrected with CGBE using Cas9 proteins with NGA-PAM recognition.

| snpId | name | geneId | phenotypeList |
|---|---|---|---|
| 536746349 | C > G | 1716\|DGUOK | Progressive external ophthalmoplegia with mitochondrial |
| | | | DNA deletions, autosomal recessive 4, not provided |
| | C > G | 4703\|NEB | Nemaline myopathy, Nemaline myopathy 2 |
| 398123350 | C > G | 272O\|GLB1 | GM1 gangliosidosis type 2, GM1 gangliosidosis type |
| | | | 2, Gangliosidosis GM1 type 3, Gangliosidosis GM1 type |
| | | | 3, Infantile GM1 gangliosidosis, Infantile GM1 |
| | | | gangliosidosis, Mucopolysaccharidosis, MPS-IV- |
| | | | B, Mucopolysaccharidosis, MPS-IV-B, not provided |
| 121913286 | C > G | 5290\|PIK3CA | Adenocarcinoma of prostate, Adenocarcinoma of |
| | | | stomach, Breast adenocarcinoma, Glioblastoma, Malignant |
| | | | melanoma of skin, Malignant neoplasm of body of |
| | | | uterus, Medulloblastoma, Neoplasm of brain, Neoplasm of |
| | | | the breast, Neoplasm of the large intestine, Squamous cell |
| | | | carcinoma of the head and neck, Transitional cell |
| | | | carcinoma of the bladder, Uterine Carcinosarcoma, Uterine |
| | | | cervical neoplasms |
| | C > G | 5896\|RAG1 | Alpha/beta T-cell lymphopenia with gamma/delta T-cell |
| | | | expansion, severe cytomegalovirus infection, and |
| | | | autoimmunity, Combined cellular and humoral immune |
| | | | defects with granulomas, Combined cellular and humoral |
| | | | immune defects with granulomas, Histiocytic medullary |
| | | | reticulosis, Severe immunodeficiency, autosomal |
| | | | recessive, T-cell negative, B-cell negative, NK cell- |
| | | | positive, Severe immunodeficiency, autosomal recessive, T- |
| | | | cell negative, B-cell negative, NK cell-positive |
| 1057517774 | C > G | 4647\|MYO7A | Deafness, autosomal recessive 2, Usher syndrome, type |
| | | | 1, not provided |
| 749491616 | C > G | 35\|ACADS | Deficiency of butyryl-CoA dehydrogenase, not provided |
| 761649878 | C > G | 5428\|POLG | POLG-Related disorder, Progressive sclerosing |
| | | | poliodystrophy, not provided |
| 104894718 | C > G | 6324\|SCN1B | Atrial fibrillation, familial, 13, Atrial |
| | | | fibrillation, familial, 13, Brugada syndrome 5, Brugada |
| | | | syndrome 5, Epileptic encephalopathy, early |
| | | | infantile, 52, Generalized epilepsy with febrile seizures |
| | | | plus, Generalized epilepsy with febrile seizures plus, type |
| | | | 1, Generalized epilepsy with febrile seizures plus, type |
| | | | 1, Seizures, not provided |
| 876657730 | G > C | 7399\|USH2A | Retinitis pigmentosa 39, Usher syndrome, type 2A, Usher |
| | | | syndrome, type 2A, not provided |
| 869320742 | G > C | 7273\|TTN | Hereditary myopathy with early respiratory failure, not |
| | | | provided |
| 672601366 | G > C | 547\|KIF1A | Mental retardation, autosomal dominant 9 |
| 863224905 | G > C | 64324\|NSD1 | Beckwith-Wiedemann syndrome, Sotos syndrome 1 |
| 756013171 | G > C | 157680\|VPS13B | Cohen syndrome, not provided |
| 120074186 | G > C | 3784\|KCNQ1 | Cardiovascular phenotype, Congenital long QT |
| | | | syndrome, Jervell and Lange-Nielsen syndrome 1, not |
| | | | provided |
| 121908195 | G > C | 1200\|TPP1 | Ceroid lipofuscinosis neuronal 2, not provided |
| 1057517420 | G > C | 6833\|ABCC8 | Familial hyperinsulinism, Persistent hyperinsulinemic |
| | | | hypoglycemia of infancy |
| 81002840 | G > C | 675\|BRCA2 | Familial cancer of breast, Hereditary breast and ovarian |
| | | | cancer syndrome, not provided |
| 730882218 | G > C | 4247\|MGAT2 | Abnormal facial shape, Abnormal glycosylation (CDG |
| | | | IIa), Carbohydrate-deficient glycoprotein syndrome type |
| | | | II, Global developmental delay |
| 1555534596 | G > C | 4763\|NF1 | Hereditary cancer-predisposing syndrome, not provided |
| 80358254 | G > C | 4864\|NPC1 | Niemann-Pick disease type C1, Niemann-Pick disease, type |
| | | | C, not provided |
| | G > C | 6261\|RYR1 | not provided |
| 147484110 | G > C | 1476\|CSTB | Epilepsy, progressive myoclonic 1A (Unverricht and |
| | | | Lundborg), Inborn genetic diseases, Progressive myoclonic |
| | | | epilepsy, Unverricht-Lundborg syndrome, not provided |

TABLE E3
Specific targetable mutations from the ClinVar database that can be
corrected with CGBE using Cas9 proteins with NG-PAM recognition.

| snpId | name | geneId | phenotypeList |
|---|---|---|---|
| 370124822 | C > G | 4595\|MUTYH | Hereditary cancer-predisposing syndrome, MYH-associated |
| | | | polyposis, not provided |
| 121908088 | C > G | 7173\|TPO | Deficiency of iodide peroxidase, not provided |
| 536746349 | C > G | 1716\|DGUOK | Progressive external ophthalmoplegia with mitochondrial DNA |
| | | | deletions, autosomal recessive 4, not provided |
| | C > G | 4703\|NEB | Nemaline myopathy, Nemaline myopathy 2 |
| 557312035 | C > G | 7273\|TTN | Dilated cardiomyopathy 1G, Limb-girdle muscular |
| | | | dystrophy, type 2J, Primary dilated cardiomyopathy |
| 587781707 | C > G | 580\|BARD1 | Breast cancer, susceptibility to, Familial cancer of |
| | | | breast, Hereditary cancer-predisposing syndrome, not provided |
| 398123350 | C > G | 272O\|GLB1 | GM1 gangliosidosis type 2, GM1 gangliosidosis type |
| | | | 2, Gangliosidosis GM1 type 3, Gangliosidosis GM1 type |
| | | | 3, Infantile GM1 gangliosidosis, Infantile GM1 |
| | | | gangliosidosis, Mucopolysaccharidosis, MPS-IV- |
| | | | B, Mucopolysaccharidosis, MPS-IV-B, not provided |
| 121913286 | C > G | 5290\|PIK3CA | Adenocarcinoma of prostate, Adenocarcinoma of |
| | | | stomach, Breast adenocarcinoma, Glioblastoma, Malignant |
| | | | melanoma of skin, Malignant neoplasm of body of |
| | | | uterus, Medulloblastoma, Neoplasm of brain, Neoplasm of the |
| | | | breast, Neoplasm of the large intestine, Squamous cell |
| | | | carcinoma of the head and neck, Transitional cell carcinoma of |
| | | | the bladder, Uterine Carcinosarcoma, Uterine cervical |
| | | | neoplasms |
| 143367518 | C > G | 1161\|ERCC8 | Cockayne syndrome type A, not provided |
| 74953290 | C > G | 324\|APC | Hereditary cancer-predisposing syndrome, not provided, not |
| | | | specified |
| 730881857 | C > G | 4683\|NBN | Hereditary cancer-predisposing |
| | | | syndrome, Microcephaly, normal intelligence and |
| | | | immunodeficiency, not provided |
| 878853697 | C > G | 2705\|GJB1 | Charcot-Marie-Tooth Neuropathy X, not provided |
| 33941377 | C > G | 3043\|HBB | Beta thalassemia intermedia, Beta-plus-thalassemia, beta |
| | | | Thalassemia, not provided |
| | C > G | 5896\|RAG1 | Alpha/beta T-cell lymphopenia with gamma/delta T-cell |
| | | | expansion, severe cytomegalovirus infection, and |
| | | | autoimmunity, Combined cellular and humoral immune defects |
| | | | with granulomas, Combined cellular and humoral immune |
| | | | defects with granulomas, Histiocytic medullary |
| | | | reticulosis, Severe immunodeficiency, autosomal recessive, T- |
| | | | cell negative, B-cell negative, NK cell-positive, Severe |
| | | | immunodeficiency, autosomal recessive, T-cell negative, B-cell |
| | | | negative, NK cell-positive |
| 397515905 | C > G | 4607\|MYBPC3 | Cardiovascular phenotype, Familial hypertrophic |
| | | | cardiomyopathy 1, Hypertrophic cardiomyopathy, Primary |
| | | | familial hypertrophic cardiomyopathy, not provided |
| 1057517774 | C > G | 4647\|MYO7A | Deafness, autosomal recessive 2, Usher syndrome, type 1, not |
| | | | provided |
| 587779833 | C > G | 472\|ATM | Ataxia-telangiectasia syndrome, Ataxia-telangiectasia |
| | | | syndrome, Familial cancer of breast, Hereditary cancer- |
| | | | predisposing syndrome, not provided |
| 137853043 | C > G | 7846\|TUBA1A | Tubulinopathies, not provided |
| 1057520574 | C > G | 7846\|TUBA1A | Tubulinopathies, not provided |
| 749491616 | C > G | 35\|ACADS | Deficiency of butyryl-CoA dehydrogenase, not provided |
| 201732356 | C > G | 5428\|POLG | not provided |
| 761649878 | C > G | 5428\|POLG | POLG-Related disorder, Progressive sclerosing |
| | | | poliodystrophy, not provided |
| 769410130 | C > G | 5428\|POLG | Progressive sclerosing poliodystrophy, not provided |
| 587783598 | C > G | 1785\|DNM2 | Myopathy, centronuclear, not provided |
| 879254375 | C > G | 3949\|LDLR | Familial hypercholesterolemia |
| 752596535 | C > G | 3949\|LDLR | Familial hypercholesterolemia |
| 875989909 | C > G | 3949\|LDLR | Familial hypercholesterolemia, Familial hypercholesterolemias |
| 104894718 | C > G | 6324\|SCN1B | Atrial fibrillation, familial, 13, Atrial |
| | | | fibrillation, familial, 13, Brugada syndrome 5, Brugada syndrome |
| | | | 5, Epileptic encephalopathy, early infantile, 52, Generalized |
| | | | epilepsy with febrile seizures plus, Generalized epilepsy with |
| | | | febrile seizures plus, type 1, Generalized epilepsy with febrile |
| | | | seizures plus, type 1, Seizures, not provided |
| 121908725 | C > G | 100\|ADA | Severe combined immunodeficiency due to ADA |
| | | | deficiency, not provided |
| 587777526 | C > G | 23394\|ADNP | Helsmoortel-van der aa syndrome, Inborn genetic diseases, not |
| | | | provided |
| 869312901 | G > C | 6497\|SKI | Shprintzen-Goldberg syndrome, not provided |
| 397516833 | G > C | 6390\|SDHB | Gastrointestinal stroma tumor, Hereditary Paraganglioma- |
| | | | Pheochromocytoma Syndromes, Hereditary cancer- |
| | | | predisposing syndrome, Paragangliomas 4, Paragangliomas |
| | | | 4, Pheochromocytoma, not provided |
| 398123527 | G > C | 2629\|GBA | Gaucher disease, Gaucher's disease, type 1 |
| 794728589 | G > C | 4000\|LMNA | Primary dilated cardiomyopathy, not provided |
| 267607570 | G > C | 4000\|LMNA | Cardiovascular phenotype, Charcot-Marie-Tooth disease, type |
| | | | 2, Dilated cardiomyopathy 1A, not provided |
| 397517977 | G > C | 7399\|USH2A | Retinitis pigmentosa 39, Usher syndrome, type 2A, Usher |
| | | | syndrome, type 2A |
| 876657730 | G > C | 7399\|USH2A | Retinitis pigmentosa 39, Usher syndrome, type 2A, Usher |
| | | | syndrome, type 2A, not provided |
| 1167218743 | G > C | 3030\|HADHA | Long-chain 3-hydroxyacyl-CoA dehydrogenase |
| | | | deficiency, Long-chain 3-hydroxyacyl-CoA dehydrogenase |
| | | | deficiency, Mitochondrial trifunctional protein deficiency |
| 869320742 | G > C | 7273\|TTN | Hereditary myopathy with early respiratory failure, not |
| | | | provided |
| 727504799 | G > C | 7273\|TTN | Cardiomyopathy, Primary dilated cardiomyopathy |
| 672601366 | G > C | 547\|KIF1A | Mental retardation, autosomal dominant 9 |
| 587784141 | G > C | 64324\|NSD1 | Beckwith-Wiedemann syndrome, Sotos syndrome 1 |
| 863224905 | G > C | 64324\|NSD1 | Beckwith-Wiedemann syndrome, Sotos syndrome 1 |
| 988423880 | G > C | 5395\|PMS2 | Hereditary cancer-predisposing syndrome, Lynch syndrome |
| 767978961 | G > C | 729920\|CRPPA | Congenital muscular dystrophy-dystroglycanopathy with brain |
| | | | and eye anomalies, type A7, Muscular dystrophy- |
| | | | dystroglycanopathy (limb-girdle), type c, 7, not provided |
| 1325951163 | G > C | 673\|BRAF | Global developmental delay, not provided |
| 756013171 | G > C | 157680\|VPS13B | Cohen syndrome, not provided |
| 398123181 | G > C | 2592\|GALT | Deficiency of UDPglucose-hexose-1-phosphate |
| | | | uridylyltransferase, not provided |
| 137853022 | G > C | 8518\|ELP1 | Familial dysautonomia |
| 104894845 | G > C | 2717\|GLA | Fabry disease, not provided |
| 104894229 | G > C | HRAS, LRRC56 | Neoplasm of the large intestine, Neoplasm of the thyroid gland |
| 120074186 | G > C | 3784\|KCNQ1 | Cardiovascular phenotype, Congenital long QT |
| | | | syndrome, Jervell and Lange-Nielsen syndrome 1, not provided |
| 121908195 | G > C | 1200\|TPP1 | Ceroid lipofuscinosis neuronal 2, not provided |
| 1057517420 | G > C | 6833\|ABCC8 | Familial hyperinsulinism, Persistent hyperinsulinemic |
| | | | hypoglycemia of infancy |
| 748523268 | G > C | 582\|BBS1 | Bardet-Biedl syndrome 1 |
| 137853150 | G > C | 10312\|TCIRG1 | Osteopetrosis autosomal recessive 1 |
| 876659710 | G > C | 472\|ATM | Ataxia-telangiectasia syndrome, Hereditary cancer- |
| | | | predisposing syndrome |
| 759520465 | G > C | 472\|ATM | Ataxia-telangiectasia syndrome, Hereditary cancer- |
| | | | predisposing syndrome, not provided |
| 539407162 | G > C | 89910\|UBE3B | Inborn genetic diseases, Kaufman oculocerebrofacial syndrome |
| 199474813 | G > C | 4633\|MYL2 | Familial hypertrophic cardiomyopathy 10, not provided |
| 81002840 | G > C | 675\|BRCA2 | Familial cancer of breast, Hereditary breast and ovarian cancer |
| | | | syndrome, not provided |
| 80358871 | G > C | 675\|BRCA2 | Breast-ovarian cancer, familial 2, Hereditary cancer- |
| | | | predisposing syndrome, not provided |
| 730882218 | G > C | 4247\|MGAT2 | Abnormal facial shape, Abnormal glycosylation (CDG |
| | | | IIa), Carbohydrate-deficient glycoprotein syndrome type |
| | | | II, Global developmental delay |
| 2229311 | G > C | 3712\|IVD | Isovaleryl-CoA dehydrogenase deficiency |
| 778768583 | G > C | 825\|CAPN3 | Limb-girdle muscular dystrophy, type 2A, not provided |
| 63750473 | G > C | 368\|ABCC6 | Pseudoxanthoma elasticum, not provided |
| 912983346 | G > C | 6687\|SPG7 | Hereditary spastic paraplegia, not provided |
| 587778720 | G > C | 7157\|TP53 | Adenocarcinoma of prostate, Adenocarcinoma of |
| | | | stomach, Adenoid cystic carcinoma, Adrenocortical |
| | | | carcinoma, Carcinoma of |
| | | | esophagus, Glioblastoma, Hepatocellular carcinoma, Hereditary |
| | | | cancer-predisposing syndrome, Lung |
| | | | adenocarcinoma, Malignant melanoma of skin, Malignant |
| | | | neoplasm of body of uterus, Nasopharyngeal |
| | | | Neoplasms, Neoplasm of brain, Neoplasm of the |
| | | | breast, Neoplasm of the large intestine, Ovarian Serous |
| | | | Cystadenocarcinoma, Pancreatic adenocarcinoma, Renal cell |
| | | | carcinoma, papillary, 1, Squamous cell carcinoma of the head |
| | | | and neck, Squamous cell carcinoma of the skin, Squamous cell |
| | | | lung carcinoma, Transitional cell carcinoma of the |
| | | | bladder, Uterine Carcinosarcoma, not specified |
| 1555534596 | G > C | 4763\|NF1 | Hereditary cancer-predisposing syndrome, not provided |
| 80358010 | G > C | 672\|BRCA1 | Breast-ovarian cancer, familial 1, Hereditary cancer- |
| | | | predisposing syndrome |
| 80358254 | G > C | 4864\|NPCI | Niemann-Pick disease type C1, Niemann-Pick disease, type |
| | | | C, not provided |
| 200727689 | G > C | 3949\|LDLR | Familial hypercholesterolemia |
| 879254565 | G > C | 3949\|LDLR | Familial hypercholesterolemia |
| 879254729 | G > C | 3949\|LDLR | Familial hypercholesterolemia |
| 121908036 | G > C | 3949\|LDLR | Familial hypercholesterolemia |
| 28942082 | G > C | 3949\|LDLR | Familial hypercholesterolemia |
| 875989926 | G > C | 3949\|LDLR | Familial hypercholesterolemia |
| | G > C | 6261\|RYR1 | not provided |
| 398123508 | G > C | 593\|BCKDHA | Maple syrup urine disease, not provided |
| 397516354 | G > C | 7137\|TNNI3 | Hypertrophic cardiomyopathy, Primary familial hypertrophic |
| | | | cardiomyopathy |
| 147484110 | G > C | 1476\|CSTB | Epilepsy, progressive myoclonic 1A (Unverricht and |
| | | | Lundborg), Inborn genetic diseases, Progressive myoclonic |
| | | | epilepsy, Unverricht-Lundborg syndrome, not provided |

TABLE F
List of Exemplary Cas9 or Cas12a Orthologs

| | UniProt or | |
|---|---|---|
| | GenBank | Nickase |
| | Accession | Mutations/Catalytic |
| Ortholog | Number | residues |
| S. pyogenes Cas9 | Q99ZW2.1 | D10A, E762A, H840A, |
| (SpCas9) | | N854A, N863A, D986A¹⁷ |
| S. aureus Cas9 | J7RUA5.1 | D10A and N580¹⁸ |
| (SaCas9) | | |
| S. thermophilus Cas9 | G3ECR1.2 | D31A and N891A¹⁹ |
| (St1Cas9) | | |
| S. pasteurianus Cas9 | BAK30384.1 | D10, H599* |
| (SpaCas9) | | |
| C. jejuni Cas9 | Q0P897.1 | D8A, H559A²⁰ |
| (CjCas9) | | |
| F. novicida Cas9 | A0Q5Y3.1 | D11, N995²¹ |
| (FnCas9) | | |
| P. lavamentivorans | A7HP89.1 | D8, H601* |
| Cas9 (PlCas9) | | |
| C. lari Cas9 (ClCas9) | G1UFN3.1 | D7, H567* |
| Pasteurella multocida | Q9CLT2.1 | |
| Cas9 | | |
| F. novicida Cpf1 | A0Q7Q2.1 | D917, E1006, D1255²¹ |
| (FnCpf1) | | |
| M. bovoculi Cpf1 | WP 052585281.1 | D986A** |
| (MbCpf1) | | |
| A. sp. BV3L6 Cpf1 | U2UMQ6.1 | D908, 993E, Q1226, D1263²³ |
| (AsCpf1) | | |
| L. bacterium N2006 | A0A182DWE3.1 | D832A²⁴ |
| (LbCpf1) | | |

*predicted based on UniRule annotation on the UniProt database.
**Unpublished but deposited at addgene by Ervin Welker: pTE4565 (Addgene plasmid # 88903)

TABLE G
List of Exemplary High Fidelity and/or PAM-relaxed RGN Orthologs

| Published HF/PAM-RGN | | |
|---|---|---|
| variants | PMID | Mutations* |
| S. pyogenes Cas9 | 26628643 | K810A/K1003A/R1060A (1.0); |
| (SpCas9) eSpCasS | | K848A/K1003A/R1060A(1.1) |
| S. pyogenes Cas9 | 29431739 | M495V/Y515N/K526E/R661Q; |
| (SpCas9) evoCas9 | | (M495V/Y515N/K526E/R661S; |
| | | M495V/Y515N/K526E/R661L) |
| S. pyogenes Cas9 | 26735016 | N497A/R661A/Q695A/Q926A |
| (SpCas9) HF1 | | |
| S. pyogenes Cas9 | 30082871 | R691A |
| (SpCas9) HiFi Cas9 | | |
| S. pyogenes Cas9 | 28931002 | N692A, M694A, Q695A, H698A |
| (SpCas9) HypaCas9 | | |
| S. pyogenes Cas9 | 30082838 | F539S, M763I, K890N |
| (SpCas9) Sniper-Cas9 | | |
| S. pyogenes Cas9 | 29512652 | A262T, R324L, S409I, E480K, E543D, |
| (SpCas9) xCas9 | | M694I, E1219V |
| S. pyogenes Cas9 | 30166441 | R1335V, L1111R, D1135V, G1218R, |
| (SpCas9) SpCas9-NG | | E1219F, A1322R, T1337R |
| S. pyogenes Cas9 | 26098369 | D1135V, R1335Q, T1337R; |
| (SpCas9) VQR/VRER | | D1135V/G1218R/R1335E/T1337R |
| S. aureus Cas9 | 26524662 | E782K/N968K/R1015H |
| (SaCas9)-KKH | | |
| enAsCas12a | U.S. Ser. No. | One or more of: E174R, S170R, S542R, |
| | 15/960,271 | K548R, K548V, N551R, N552R, K607R, |
| | | K607H, e.g., E174R/S542R/K548R, |
| | | E174R/S542R/K607R, |
| | | E174R/S542R/K548V/N552R, |
| | | S170R/S542R/K548R, S170R/E174R, |
| | | E174R/S542R, S170R/S542R, |
| | | E174R/S542R/K548R/N551R, |
| | | E174R/S542R/K607H, |
| | | S170R/S542R/K607R, or |
| | | S170R/S542R/K548V/N552R |
| enAsCas12a-HF | U.S. Ser. No. | One or more of: E174R, S542R, K548R, |
| | 15/960,271 | e.g., E174R/S542R/K548R, |
| | | E174R/S542R/K607R, |
| | | E174R/S542R/K548V/N552R, |
| | | S170R/S542R/K548R, S170R/E174R, |
| | | E174R/S542R, S170R/S542R, |
| | | E174R/S542R/K548R/N551R, |
| | | E174R/S542R/K607H, |
| | | S170R/S542R/K607R, or |
| | | S170R/S542R/K548V/N552R, with the |
| | | addition of one or more of: N282A, |
| | | T315A, N515A and K949A |
| enLbCas12a(HF) | U.S. Ser. No. | One or more of T152R, T152K, D156R, |
| | 15/960,271 | D156K, Q529K, G532R, G532K, G532Q, |
| | | K538R, K538V, D541R, Y542R, M592A, |
| | | K595R, K595H, K595S or K595Q, e.g., |
| | | D156R/G532R/K538R, |
| | | D156R/G532R/K595R, |
| | | D156R/G532R/K538V/Y542R, |
| | | T152R/G532R/K538R, T152R/D156R, |
| | | D156R/G532R, T152R/G532R, |
| | | D156R/G532R/K538R/D541R, |
| | | D156R/G532R/K595H, |
| | | T152R/G532R/K595R, |
| | | T152R/G532R/K538V/Y542R, optionally |
| | | with the addition of one or more of: |
| | | N260A, N256A, K514A, D505A, K881A, |
| | | S286A, K272A, K897A |
| enFnCas12a(HF) | U.S. Ser. No. | One or more of T177A, K180R, K180K, |
| | 15/960,271 | E184R, E184K, T604K, N607R, N607K, |
| | | N607Q, K613R, K613V, D616R, N617R, |
| | | M668A, K671R, K671H, K671S, or K671Q, |
| | | e.g., E184R/N607R/K613R, |
| | | E184R/N607R/K671R, |
| | | E184R/N607R/K613V/N617R, |
| | | K180R/N607R/K613R, K180R/E184R, |
| | | E184R/N607R, K180R/N607R, |
| | | E184R/N607R/K613R/D616R, |
| | | E184R/N607R/K671H, |
| | | K180R/N607R/K671R, |
| | | K180R/N607R/K613V/N617R, optionally |
| | | with the addition of one or more of: |
| | | N305A, N301A, K589A, N580A, K962A, |
| | | S334A, K320A, K978A |
| chimeric Cas9 | 30718489 | S. aureus Cas9 with PAM interaction |
| cCas9 | | domain from SaCas9 orthologues, |
| | | expands recognition and targetability |
| | | of NNVRRN, NNVACT, NNVATG, |
| | | NNVATT, NNVGCT, NNVGTG, and |
| | | NNVGTT PAM sequences |
| Streptococcus | doi: https://doi.org/ | Recognizes 5′-NAA-3′ PAM |
| macacae (Smac) Cas9 | 10.1101/429654 | |
| NCTC 11558 | | |
| Spy-mac Cas9, | doi: https://doi.org/ | Recognizes 5′-NAA-3′ PAM |
| Smac-py Cas9 | 10.1101/429654 | |
| N. meningitidis | 30581144 | Recognizes N₄CC PAM |
| Nme2Cas9 | | |
| SpG Cas9 | 32217751 | SpCas9 variant capable of targeting |
| (SEQ-ID 158) | | NGN PAMs |
| | | D1135L/S1136W/G1218K/E1219Q/ |
| | | R1335Q/T1337R |
| | | Also as SpG-HF1 in combination |
| | | with N497A/R661A/Q695A/Q926A |
| SpRY Cas9 | 32217751 | SpCas9 variant capable of targeting |
| (SEQ-ID 157) | | NRN > NYN PAMs |
| | | SpRY(A61R/L1111R/D1135L/S1136W/ |
| | | G1218K/E1219Q/N1317R/A1322R/ |
| | | R1333P/R1335Q/T1337R); also as |
| | | SpRY-HF1 in combination with |
| | | N497A/R661A/Q695A/Q926A |

*predicted based on UniRule annotation on the UniProt database.

TABLE H
Amino acid substitutions predicted to generate ABE variants
with reduced RNA editing. This table lists the residue changes
in either or both TadA domains of the TadA heterodimer (present
in e.g., ABE7.10) predicted to cause an RRE phenotype, next
to the reasoning behind the proposed changes.

| | |
|---|---|
| Residues to Change | Rationale |

| Wild type | Engineered | Protein | Binding |
|---|---|---|---|
| (WT) TadA | TadA | structure | prediction |
| S7 | S205 | | x |
| H8 | H206 | | x |
| E9 | E207 | | x |
| Y10 | Y208 | | x |
| W11 | W209 | | x |
| M12 | M210 | | x |
| R13 | R211 | x | x |
| H14 | H212 | | x |
| T17 | T215 | | x |
| K20 | K218 | x | x |
| R21 | R219 | x | x |
| W23 | R221 | x | |
| E25 | E223 | x | x |
| R26 | R224 | x | x |
| E27 | E225 | x | |
| V28 | V226 | x | x |
| P29 | P227 | | x |
| V30 | V228 | x | |
| G31 | G229 | | x |
| H36 | L234 | | x |
| N37 | N235 | | x |
| N38 | N236 | | x |
| N46 | N244 | x | |
| R47 | R245 | | x |
| P48 | A246 | x | |
| I49 | I247 | x | |
| G50 | G248 | | x |
| R51 | I249 | | x |
| H52 | H250 | | x |
| D53 | D251 | | x |
| P54 | P252 | | x |
| T55 | T253 | | x |
| A56 | A254 | x | |
| H57 | H255 | x | x |
| A58 | A256 | x | |
| E59 | E257 | x | |
| R64 | R262 | | x |
| Q65 | Q263 | | x |
| G67 | G265 | | x |
| L68 | L266 | | x |
| Q71 | Q269 | | x |
| N72 | N270 | | x |
| R74 | R272 | | x |
| I76 | I274 | | x |
| D77 | D275 | | x |
| Y81 | Y279 | | x |
| V82 | V280 | x | |
| T83 | T281 | | x |
| L84 | F282 | x | |
| E85 | E283 | x | |
| P86 | P284 | x | x |
| C87 | C285 | x | x |
| V88 | V286 | | x |
| M89 | M287 | | x |
| C90 | C288 | x | x |
| R98 | R296 | | x |
| G100 | G298 | | x |
| R101 | R299 | | x |
| A106 | V304 | x | |
| R107 | R305 | x | |
| D108 | N306 | x | |
| A109 | A307 | x | |
| K110 | K308 | x | |
| T111 | T309 | x | |
| D119 | D317 | | x |
| H122 | H320 | | x |
| H123 | Y321 | | x |
| P124 | P322 | | x |
| G125 | G323 | | x |
| M126 | M324 | | x |
| N127 | N325 | | x |
| H128 | H326 | | x |
| R129 | R327 | | x |
| V130 | V328 | | x |
| E131 | E329 | | x |
| I132 | I330 | | x |
| T133 | T331 | | x |
| E134 | E332 | | x |
| G135 | G333 | | x |
| L137 | L335 | | x |
| A138 | A336 | x | x |
| D139 | D337 | | x |
| E140 | E338 | | x |
| C141 | C339 | x | x |
| A142 | A340 | x | x |
| A143 | A341 | x | x |
| L144 | L342 | | x |
| L145 | L343 | x | x |
| S146 | C344 | x | |
| D147 | Y345 | | x |
| F148 | F346 | x | x |
| F149 | F347 | x | x |
| R150 | R348 | x | x |
| M151 | M349 | | x |
| R152 | P350 | x | x |
| R153 | R351 | x | |
| Q154 | Q352 | | x |
| E155 | V353 | x | x |
| I156 | F354 | | x |
| K157 | N355 | | x |
| K160 | K358 | | x |
| K161 | K359 | | x |

TABLE I
Amino acid residues whose mutation may be expected to
yield base editor RRE variants. These positions were
chosen based on a APOBEC1 structural model and RNA/DNA
binding predictions or based on previous description
in the literature as residues whose mutation reduced
the RNA editing or binding activities of isolated APOBEC1.

| Residue Change | Reasoning |
|---|---|
| E24, V25 | model & RNA binding prediction |
| R118, Y120, H121, R126 | model & RNA binding prediction |
| W224-K229 | model & RNA binding prediction |
| P168-I186 | model & RNA binding prediction |
| L173 + L180 | model & RNA binding prediction |
| R15, R16, R17, to K15-17 & A15-17 | Teng et al, J Lipid Research 1999 |
| Deletion E181-L210 | Teng et al, J Lipid Research 1999 |
| P190 + P191 | Teng et al, J Lipid Research 1999 |
| Deletion L210-K229 (C-terminal) | Teng et al, J Lipid Research 1999 |
| Deletion S2-L14 (N-terminal) | Teng et al, J Lipid Research 1999 |
| V64, F66 | Teng et al, J Lipid Research 1999 |
| L180A | Teng et al, J Lipid Research 1999 |
| C192, L193, L196, P201, L203, | Teng et al, J Lipid Research 1999 |
| L210, P219, P220 | |
| P92 | MacGinnitie et al, JBC 1995 |

TABLE J
UNG and SMUG analogues

| | Uniprot | |
|---|---|---|
| | accession number | |
| UNG orthologue | | |
| Mouse | P97931 | SEQ ID NO: 318 |
| Rat | Q5BK44 | SEQ ID NO: 319 |
| Baker's yeast | P12887 | SEQ ID NO: 320 |
| Caenorhabditis | Q9U221 | SEQ ID NO: 321 |
| elegans | | |
| Mouse-ear cress | Q9LIH6 | SEQ ID NO: 322 |
| Zebrafish | Q7ZVD1 | SEQ ID NO: 323 |
| Rabbit | G1SJ42 | SEQ ID NO: 324 |
| Polar bear | A0A452THE0 | SEQ ID NO: 325 |
| Black snub-nosed | A0A2K6MB33 | SEQ ID NO: 326 |
| monkey | | |
| Common wombat | A0A4X2KC02 | SEQ ID NO: 327 |
| Mycobacterium | A0A1X2AUJ0 | SEQ ID NO: 328 |
| riyadhense | | |
| Indian major carp | A0A498LRM7 | SEQ ID NO: 329 |
| Fission yeast | O74834 | SEQ ID NO: 330 |
| Japanese pufferfish | A0A3B5KG53 | SEQ ID NO: 331 |
| Thirteen-lined ground | I3M8Q6 | SEQ ID NO: 332 |
| squirrel | | |
| Japanese rice fish | A0A3P9H4T8 | SEQ ID NO: 333 |
| Electric eel | A0A4W4HK79 | SEQ ID NO: 334 |
| Western clawed frog | A0A5G3K4Q6 | SEQ ID NO: 335 |
| Enterobacter cloacae | A0A0F0TTY1 | SEQ ID NO: 336 |
| subsp, cloacae | | |
| Clostridium oryzae | A0A1V4IJH4 | SEQ ID NO: 337 |
| Lactobacillus apis | A0A1C3ZIJ7 | SEQ ID NO: 338 |
| Flavobacterium sp. | A0A519N079 | SEQ ID NO: 339 |
| Delftia lacustris | A0A1H3TI78 | SEQ ID NO: 340 |
| Lactococcus garvieae | A0A3D4RH89 | SEQ ID NO: 341 |
| Lactobacillus rodentium | A0A2Z6T8A7 | SEQ ID NO: 342 |
| SMUG orthologue | | |
| Human | Q53HV7 | SEQ ID NO: 343 |
| Rat | Q811Q1 | SEQ ID NO: 344 |
| Mouse | Q6P5C5 | SEQ ID NO: 345 |
| African clawed frog | Q9YGN6 | SEQ ID NO: 346 |
| Bovine | Q59I47 | SEQ ID NO: 347 |

### EXAMPLES

[0161] The invention is further described in the following examples, which do not limit the scope of the invention described in the claims.

### Methods

### Molecular Cloning

[0162] All base editor (BE) and prime editor (PE) constructs were cloned into a mammalian expression plasmid backbone under the control of a pCMV promoter (AgeI and NotI restriction digest of parental plasmid Addgene #112101). The wild-type SpCas9 construct (SQT 817; Addgene #53373) is expressed under the control of a CAG promoter. All BE and PE constructs were encoded as P2A-eGFP fusions for co-translational expression of the base/prime editors and eGFP. Gibson fragments with matching overlaps were PCR-amplified using Phusion High-fidelity polymerase (NEB). Fragments were gel-purified and assembled for 1 hour at 50° C. and transformed into chemically competent E. coli (XL1-Blue, Agilent). The UNGs used in our experiments originated either from E. coli (eUNG; UniProtKB-P12295) or Homo sapiens (hUNG; UniProtKB-P13051), were codon-optimized for expression in human cells and synthesized as gblocks (IDT). All guide RNA (gRNA) constructs were cloned into a BsmBI-digested pUC19-based entry vector (BPK1520, Addgene #65777) with a U6 promoter driving gRNA expression. We designed the pegRNAs to implement the same C-to-G changes that the CGBE constructs would install and followed previously described default design rules for designing pegRNAs and ngRNAs15. PegRNAs were cloned into the BsaI-digested pU6-pegRNA-GG-acceptor entry vector (Addgene #132777) and ngRNAs were cloned into the abovementioned BsmBI-digested entry vector BPK1520. Oligos containing the spacer, the 5′phosphorylated pegRNA scaffold, and the 3′ extension sequences were annealed to form dsDNA fragments with compatible overhangs and ligated using T4 ligase (NEB). All plasmids used for transfection experiments were prepared using Qiagen Midi or Maxi Plus kits.

### Guide RNAs

All gRNAs for base editors were of the form
(SEQ ID NO 145)
5′-NNNNNNNNNNNNNNNNNNNNCGTTTTAGAGCTAGAAATAGCAAGTT
AAAATAAGGCTAGTCCGTTATCAACTTGAAAAAGTGGCACCGAGTCGGT
GCTTTTTTT-3′.

TABLE K
Shown below are the protospacer regions (NNNNNNNNNNNNNNNNNNNN in
SEQ ID NO: 146) for these gRNAs (all written 5′ to 3′).

| target gene/site | protospacer sequence | SEQ ID NO: |
|---|---|---|
| ABE site 7 | GAATACTAAGCATAGACTCC | 216 |
| ABE site 8 | GTAAACAAAGCATAGACTGA | 217 |
| ABE site 9 | GAAGACCAAGGATAGACTGC | 218 |
| ABE site 18 | ACACACACACTTAGAATCTG | 219 |
| ABE site 19 | CACACACACTTAGAATCTGT | 220 |
| ABE site 20 | TTAAGCTGTAGTATTATGAA | 221 |
| ABE site 21 | CCTGGCCTGGGTCAATCCTT | 222 |
| EMX1 site 1 | GAGTCCGAGCAGAAGAAGAA | 223 |
| EMX1 site 2 | GTATTCACCTGAAAGTGTGC | 224 |
| FANCF site 1 | GGAATCCCTTCTGCAGCACC | 225 |
| HEK site 2 (ABE site 1) | GAACACAAAGCATAGACTGC | 226 |
| HEK site 3 | GGCCCAGACTGAGCACGTGA | 227 |
| HEK site 4 | GGCACTGCGGCTGGAGGTGG | 228 |
| HEK site 5 | CTGGCCTGGGTCAATCCTTG | 229 |
| HEK site 6 | CAAAGCAGGATGACAGGCAG | 230 |
| PDCD1 site 2 | ACTTCCACATGAGCGTGGTC | 231 |
| PPP1R12C site 2 | GGCACTCGGGGGCGAGAGGA | 232 |
| PPP1R12C site 3 | GAGCTCACTGAACGCTGGCA | 233 |
| PPP1R12C site 4 | GACCCTCAGCCGTGCTGCTC | 234 |
| PPP1R12C site 5 | GCTGACTCAGAGACCCTGAG | 235 |
| PPP1R12C site 6 | GGGGCTCAACATCGGAAGAG | 236 |
| PPP1R12C site 7 | GCTGGCTCAGGTTCAGGAGA | 237 |
| PPP1R12C site 8 | CTGCTCGGGGTGGGACTCTG | 238 |
| RNF2 site 1 | GTCATCTTAGTCATTACCTG | 239 |
| VEGFA site 4 | GAGGACGTGTGTGTCTGTGT | 240 |

For C5, 7, 8 guides

| | | |
|---|---|---|
| ABE site 23 | TAAGCATAGACTCCAGGATA | 241 |
| ABE site 24 | TACTCTGAGTGTACAAAAGA | 242 |
| ABE site 25 | AGTAAACAAAGCATAGACTG | 243 |
| ABE site 26 | TTTGTGCAAACACAGATTGC | 244 |
| ABE site 27 | CGGGCATCAGAATTCCCTGG | 245 |
| EMX1 site 3 | AAAGTACAAACGGCAGAAGC | 246 |
| EMX1 site 4 | GTACAAACGGCAGAAGCTGG | 247 |
| FANCF site 2 | GCTGCAGAAGGGATTCCATG | 248 |
| FANCF site 3 | CGCCGTCTCCAAGGTGAAAG | 249 |
| FANCF site 4 | AGCGATCCAGGTGCTGCAGA | 250 |
| HEK site 7 | GGAACACAAAGCATAGACTG | 251 |
| HEK site 8 | TGTGTTCCAGTTTCCTTTAC | 252 |
| HEK site 9 | TTGTTTGCAGCTATTCAGGC | 253 |
| PPP1R12C site 9 | AAGTCGAGGGAGGGATGGTA | 254 |
| PPP1R12C site 10 | GACACGTGGATTGTGCTGTC | 255 |
| PPP1R12C site 11 | GTCATACACTGGGCTGGCCA | 256 |
| PPP1R12C site 12 | CAAAGTCCAGGACCGGCTGG | 257 |
| PPP1R12C site 13 | GCATGGCTCTAGTGCTTTCC | 258 |
| PPP1R12C site 14 | GGTCATACACTGGGCTGGCC | 259 |
| PPP1R12C site 15 | AAGGAGACAAAGTCCAGGAC | 260 |
| PPP1R12C site 16 | GATTGTGCTGTCAGGAGCTC | 261 |
| RNF2 site 2 | ATGACTAAGATGACTGCCAA | 262 |
| RNF2 site 3 | TGAGTTACAACGAACACCTC | 263 |

For guides with NGT or NGAG PAM

| | | |
|---|---|---|
| CGBE_NG site 1 | ACCATCTTTTGTACACTCAG | 264 |
| CGBE_NG site 2 | CACTTCTCTTCCTGCCCTCT | 265 |
| CGBE_NG site 3 (EMX1) | AGCTTCTGCCGTTTGTACTT | 266 |
| CGBE_NG site 4 (RNF2) | CGTCTCATATGCCCCTTGGC | 267 |
| CGBE_NG site 5 | ATAGACTCCAGGATAAGGTA | 268 |
| CGBE_NG site 6 | CTCAACATCGGAAGAGGGGA | 269 |
| (PPP1R12C) | | |
| CGBE_VRQR site 1 | TCAATCCTTGGGGCCCAGAC | 270 |
| CGBE_VRQR site 2 | ATGTTCCAATCAGTACGCAG | 271 |
| (FANCF) | | |
| CGBE_VRQR site 3 | GATGACTGCCAAGGGGCATA | 272 |
| (RNF2) | | |
| CGBE_VRQR site 4 | AAGTACAAGCACTCAATGTG | 273 |
| CGBE_VRQR site 5 | ACACACACTTAGAATCTGTG | 274 |
| CGBE_VRQR site 6 | GCGGACAGTGGACGCGGCGG | 275 |
| (VEGFA) | | |

TABLE L
Shown below are the sequence for DNA off-target
sites (all written 5′ to 3′).

| | | SEQ |
|---|---|---|
| | | ID |
| target site | sequence | NO: |
| HEK site 2 off 1 | GAACACAATGCATAGATTGC | 276 |
| HEK site 2 off 2 | AAACATAAAGCATAGACTGC | 277 |
| HEK site 3 off 1 | CACCCAGACTGAGCACGTGC | 278 |
| HEK site 3 off 2 | GACACAGACTGGGCACGTGA | 279 |
| HEK site 3 off 3 | AGCTCAGACTGAGCAAGTGA | 280 |
| HEK site 3 off 4 | AGACCAGACTGAGCAAGAGA | 281 |
| HEK site 3 off 5 | GAGCCAGAATGAGCACGTGA | 282 |
| HEK site 4 off 1 | TGCACTGCGGCCGGAGGAGG | 283 |
| HEK site 4 off 2 | GGCTCTGCGGCTGGAGGGGG | 284 |
| HEK site 4 off 3 | GGCACGACGGCTGGAGGTGG | 285 |
| HEK site 4 off 4 | GGCATCACGGCTGGAGGTGG | 286 |
| HEK site 4 off 5 | GGCGCTGCGGCGGGAGGTGG | 287 |
| EMX1 site 1 off 1 | GAGTCTAAGCAGAAGAAGAA | 288 |
| EMX1 site 1 off 2 | GAGGCCGAGCAGAAGAAAGA | 289 |
| EMX1 site 1 off 3 | GAGTCCTAGCAGGAGAAGAA | 290 |
| EMX1 site 1 off 4 | GAGTCCGGGAAGGAGAAGAA | 291 |
| EMX1 site 1 off 5 | GAGCCGGAGCAGAAGAAGGA | 292 |
| FANCF site 1 off 1 | GGAACCCCGTCTGCAGCACC | 293 |
| FANCF site 1 off 2 | GGAGTCCCTCCTACAGCACC | 294 |
| FANCF site 1 off 3 | AGAGGCCCCTCTGCAGCACC | 295 |
| FANCF site 1 off 4 | ACCATCCCTCCTGCAGCACC | 296 |
| FANCF site 1 off 5 | GGATTGCCATCCGCAGCACC | 297 |
| FANCF site 1 off 6 | TGAATCCCATCTCCAGCACC | 298 |

All pegRNAs for prime editors were of the form
(SEQ ID NO: 299)
5′-NNNNNNNNNNNNNNNNNNNNGTTTTAGAGCTAGAAATAGCAAGTTA
AAATAAGGCTAGTCCGTTATCAACTTGAAAAAGTGGCACCGAGTCGGTG
CNNNNNNNNNNNNNNNNNNNNTTTTTTT-3′.

TABLE M
Shown below are the protospacer and 3′ extension sequences for these pegRNAs
(all written 5′ to 3′).

| target | protospacer | SEQ ID | | SEQ ID |
|---|---|---|---|---|
| gene/site | sequence | NO: | 3′ extension sequence | NO: |
| ABE_site7_ | CTATATTACTT | 300 | GAATAGTAAGCATAGACTC | 301 |
| CtoG | ACCTTATCC | | CAGGATAAGGTAAGTAATAT | |
| ABE_site8_ | ATGAGGAAAG | 302 | GTAAAGAAAGCATAGACTG | 303 |
| CtoG | GGACTAGAGT | | AGGGGTACAATCCTACTCT | |
| | | | AGTCCCTTTCCTC | |
| HEK_site2_ | GCTGGCCCTG | 304 | GCTTTCTGTTCCAGTTTCCT | 305 |
| CtoG | TAAAGGAAAC | | TTACAGGGCCA | |
| RNF2_site1_ | TGAGTTACAA | 306 | GTCATGTTAGTCATTACCTG | 307 |
| CtoG | CGAACACCTC | | AGGTGTTCGTTGTAACT | |
| HEK_site3_ | GGCCCAGACT | 308 | TCTGCCATCAAAGCGTGCT | 309 |
| CTTins | GAGCACGTGA | | CAGTCTG | |
| FANCF_site1_ | GGAATCCCTT | 310 | GGAAAAGCGATCAAGGTGC | 311 |
| GtoT | CTGCAGCACC | | TGCAGAAGGGA | |

All nicking gRNAs for PE3 system were of the form
(SEQ ID NO: 145)
5′-NNNNNNNNNNNNNNNNNNNNCGTTTTAGAGCTAGAAATAGCAAGTTAA
AATAAGGCTAGTCCGTTATCAACTTGAAAAAGTGGCACCGAGTCGGTGCTT
TTTTT-3′.

TABLE N
Shown below are the protospacer regions for these
nicking gRNAs (all written 5′ to 3′).

| | | SEQ ID |
|---|---|---|
| target gene/site | PE3 nicking guide RNA | NO: |
| ABE_site 7_CtoG | AGAATGGCAGGCACGTAGTA | 312 |
| ABE_site 8_CtoG | TGCAACAGCTATGAAATAGC | 313 |
| HEK_site 2_CtoG | TTGTTTGCAGCTATTCAGGC | 314 |
| RNF2_site 1_CtoG | TACACGTCTCATATGCCCCT | 315 |
| HEK_site 3 CTTins | GTCAACCAGTATCCCGGTGC | 316 |
| FANCF_site 1_GtoT | GAAGCTCGGAAAAGCGATCA | 317 |

### Cell Culture

[0164] STR-authenticated HEK293T (CRL-3216), K562 (CCL-243), HeLa (CCL-2), and U2OS cells (similar match to HTB-96; gain of #8 allele at the D5S818 locus) were used in this study. HEK293T and HeLa cells were grown in Dulbecco's Modified Eagle Medium (DMEM, Gibco) with 10% heat-inactivated fetal bovine serum (FBS, Gibco) supplemented with 1% penicillin-streptomycin (Gibco) antibiotic mix. K562 cells were grown in Roswell Park Memorial Institute (RPMI) 1640 Medium (Gibco) with 10% FBS supplemented with 1% Pen-Strep and 1% GlutaMAX (Gibco). U2OS cells were grown in DMEM with 10% FBS supplemented with 1% Pen-Strep and 1% GlutaMAX. Cells were grown at 37° C. in 5% CO2 incubators and periodically passaged upon reaching around 80% confluency. Cell culture media supernatant was tested for mycoplasma contamination using the MycoAlert mycoplasma detection kit (Lonza) and all tests were negative throughout the experiments.

### Transfections

[0165] HEK293T cells were seeded at 1.25×10⁴ cells per well into 96-well flat bottom cell culture plates (Corning) for DNA on-target experiments or at 6.25×10⁴ cells per well into 24-well cell culture plates (Corning) for DNA off-target experiments. 24 hours post-seeding, cells were transfected with 30 ng of control or base/prime editor plasmid and 10 ng of gRNA plasmid (and 3.3 ng nicking gRNA plasmid for PE3) using 0.3 μL of TransIT-X2 (Mirus) lipofection reagent for experiments in 96-well plates, or 150 ng control or base editor plasmid and 50 ng gRNA, and 1.5 μL TransIT-X2 for experiments in 24-well plates. K562 cells were electroporated using the SF Cell Line Nucleofector X Kit (Lonza), according to the manufacturer's protocol with 2×10⁵ cells per nucleofection and 800 ng control or base/prime editor plasmid, 200 ng gRNA or pegRNA plasmid, and 83 ng nicking gRNA plasmid (for PE3). U2OS cells were electroporated using the SE Cell Line Nucleofector X Kit (Lonza) with 2×10⁵ cells and 800 ng control or base/prime editor plasmid, 200 ng gRNA or pegRNA, and 83 ng nicking gRNA (for PE3). HeLa cells were electroporated using the SE Cell Line 4D-Nucleofector X Kit (Lonza) with 5×10⁵ cells and 800 ng control or base/prime editor, 200 ng gRNA or pegRNA, and 83 ng nicking gRNA (for PE3). 72 hours post-transfection, cells were lysed for extraction of genomic DNA (gDNA).

### DNA Extraction

[0166] HEK293T cells were washed with 1×PBS (Corning) and lysed overnight by shaking at 55° C. with 43.5 μl of gDNA lysis buffer (100 mM Tris-HCl at pH 8, 200 mM NaCl, 5 mM EDTA, 0.05% SDS) supplemented with 5.25 μl of 20 mg/ml Proteinase K (NEB) and 1.25 μl of 1M DTT (Sigma) per well for experiments in 96-well plates, or with 174 μl DNA lysis buffer, 21 μl Proteinase K, and 5 μL 1M DTT per well for experiments in 24-well plates. K562 cells were centrifuged for 5 min, media removed, and lysed overnight by shaking at 55° C. with 174 μl DNA lysis buffer, 21 μl Proteinase K, and 5 μL 1M DTT per well in 24-well plates. U2OS cells and HeLa cells were washed with 1×PBS and lysed overnight shaking at 55° C. with 174 μl DNA lysis buffer, 21 μl Proteinase K, and 5 μL 1M DTT per well in 24-well plates. Subsequently, gDNA was extracted from lysates using 1-2× paramagnetic beads as previously described⁷ and eluted in 45 μl of 0.1×EB buffer. DNA extraction was performed using a Biomek FX^{P} Laboratory Automation Workstation (Beckman Coulter).

### Targeted Amplicon Sequencing

[0167] DNA targeted amplicon sequencing was performed as previously described.⁷ Briefly, extracted gDNA was quantified using the Qubit dsDNA HS Assay Kit (Thermo Fisher). Amplicons were constructed in 2 PCR steps. In the first PCR, regions of interest (170-250 bp) were amplified from 5-20 ng of gDNA with primers containing Illumina forward and reverse adapters on both ends (Supplementary Table 9). PCR products were quantified on a Synergy HT microplate reader (BioTek) at 485/528 nm using a Quantifluor dsDNA quantification system (Promega), pooled and cleaned with 0.7× paramagnetic beads, as previously described.⁷ In a second PCR step (barcoding), unique pairs of Illumina-compatible indexes (equivalent to TruSeq CD indexes, formerly known as TruSeq HT) were added to the amplicons. The amplified products were cleaned up with 0.7× paramagnetic beads, quantified with the Quantifluor or Qubit systems, and pooled before sequencing. The final library was sequenced on an Illumina MiSeq machine using the Miseq Reagent Kit v2 (300 cycles, 2×150 bp, paired-end). Demultiplexed FASTQ files were downloaded from BaseSpace (Illumina).

### Example 1. ABE Induces C-to-G Editing in Human HEK293T Cells

[0168] Human HEK293T cells were transfected with plasmids encoding nCas9, ABEmax, miniABEmax-K20/R21A, and miniABEmax-V82G (FIG. 1-2) and gRNAs targeting several genomic sites (e.g. FANCF site 1, HEK site 2 and ABE site 7). After 72 hours, gDNA was extracted and targeted amplicon sequencing was performed to determine the on-target DNA editing of ABE constructs. C-to-G editing was seen on all three sites next to the expectedly robust A-to-G DNA base editing and probably stemmed from deamination of cytosine by the adenosine deaminase TadA, followed by downstream DNA and base excision repair (FIG. 1-4)

### Example 2. Engineering of CGBE1 and its Testing at 25 Genomic Loci

[0169] Given the observation outlined in Example 1 on ABE-mediated C-to-G alterations, we wondered whether we could induce these edits more efficiently by modifying the BE4max CBE^{8,15}, which harbors an enzyme actually intended to deaminate cytosines (the rat APOBEC1 cytidine deaminase)(FIG. 5-6). Removal of the two UGIs from BE4max to create BE4maxΔUGI resulted in an increase in C-to-G (and to a lesser degree C.-to-A) edits relative to wild-type BE4max when tested with seven different gRNAs targeted to sites with Cs at protospacer positions 5, 6, and 7 in HEK293T cells (FIG. 13). In general, C-to-G editing was observed with BE4maxΔUGI at Cs that were preceded by A, C, or T, with the most efficient editing generally observed with Cs at protospacer position 6 (FIG. 13). We also observed a substantially higher frequency of indels with BE4maxΔUGI relative to BE4max (FIGS. 13 & 15), consistent with the idea that this fusion is likely more efficient at creating abasic sites.¹ Reasoning that creation of an abasic site is important for increased C-to-G editing, we further hypothesized that adding human UNG (hUNG) enzyme to BE4maxΔUGI might enhance the frequency of desired edits. However, a BE4maxΔUGI-hUNG fusion possessed somewhat decreased C-to-G editing activity and did not induce appreciably changed frequencies of indels with the seven gRNAs tested (although it did show decreased C-to-T editing activity) (FIGS. 13 & 15). Similar results were obtained when hUNG was fused at the N-terminus of BE4maxΔUGI (FIG. 14). Fusion of UNG to ABEmax did not yield enhanced C-to-G editing compared to ABEmax (FIG. 14). We also tested a variety of CBEs that are based on non-APOBEC1 deaminase architectures, such as human A3A and enhanced A3A-BE3¹⁷, human AID-BE3¹⁵, and the Petromyzon marinus CDA1-based Target-AID², as well as variants thereof lacking UGIs and having added UNGs. Among this larger ensemble of variants, none consistently showed higher activity than the BE4maxΔUGI-hUNG editor (FIG. 16).

[0170] We also investigated whether introducing mutations into the APOBEC1 part of BE4maxΔUGI-hUNG might further increase the frequency of C-to-G editing. Although we do not have a mechanistic understanding of how C-to-G edits are induced, we reasoned that altering the deamination dynamics of APOBEC1 might also influence the editing outcome. We focused on the APOBEC1 R33A mutation, a substitution we previously showed can decrease off-target RNA editing while substantially preserving the efficiency and increasing the precision of on-target DNA editing by CBEs⁵. We found that introduction of R33A into BE4maxΔUGI-hUNG increased C-to-G editing frequencies with three of the seven gRNAs tested in HEK293T cells while leaving editing frequencies essentially unaltered with the other four (FIG. 13). The effect of the R33A variant was most striking with the FANCF site 1 gRNA, which had shown virtually no C-to-G editing with any of the other editors we tested but now showed a mean editing frequency of 14.0% (FIG. 13). Interestingly, BE4max(R33A)ΔUGI-hUNG on average showed lower indel byproducts with 6 out of 7 gRNAs compared to BE4maxΔUGI-hUNG (FIG. 15).

[0171] We additionally explored whether replacing the hUNG present in the BE4max(R33A)ΔUGI editor with an orthologous UNG from Escherichia coli (eUNG) might further increase the efficiency of C-to-G edits. We created two additional editors: BE4max(R33A)ΔUGI-eUNG or eUNG-BE4max(R33A)ΔUGI with an eUNG added to the carboxy- or amino-terminal ends, respectively. Testing of these fusions in HEK293T cells revealed that both induced C-to-G edits with higher frequencies than BE4max(R33A)ΔUGI-hUNG for six out of seven gRNAs tested (mean editing frequencies ranging from 3.3-57.0% and 8.5-62.6% for BE4max(R33A)ΔUGI-eUNG and eUNG-BE4max(R33A)ΔUGI, respectively) (FIG. 13). Indel frequencies with both fusions were generally comparable to those observed with BE4max(R33A)ΔUGI-hUNG (FIG. 15). Given its higher C-to-G editing activity, we chose the eUNG-BE4max(R33A)ΔUGI fusion (hereafter referred to as C-to-G Base Editor 1 (CGBE1)) for additional characterization.

[0172] To more comprehensively characterize CGBE1, we tested its activity with 18 additional gRNAs in human HEK293T cells. 12 of the sites targeted by these 18 gRNAs have a C at position 6 (“C6-sites”) (FIGS. 18 & 20) and 6 have a C at positions 4, 5, 7, or 8 (“non-C6-sites”) (FIGS. 18 & 20). For 16 of the 18 sites, CGBE1 induced C-to-G edits with substantially higher frequencies than what was observed with its parental CBE control (BE4max(R33A)) (FIG. 18). Highly efficient C-to-G edits were observed for 4 of the 18 sites (ABE site 7, ABE site 8, HEK site 2, and PPP1R12C site 6), with mean editing frequencies ranging from 41.7 to 71.5% (FIG. 18). C-to-G edits were by far the most efficiently induced edits at these 4 sites with only very low levels of C-to-T or C-to-A byproducts observed (FIG. 18). C-to-G was also the most efficiently induced edit for 6 additional sites albeit at lower frequencies (three C6-sites and three non-C6-sites) (FIG. 18). In total, when combined with the results obtained with the initial seven gRNAs described above (FIG. 13), CGBE1 induced C-to-G editing with mean frequencies of 20% or higher at 14 of the 25 sites tested (FIGS. 13 & 18). Notably, C-to-G editing was most efficient for Cs embedded in an AT-rich sequence context (FIGS. 13 & 18). Analysis of the spatial distribution of editing across all 25 sites tested shows that the mean frequency of C-to-G editing was highest at position 6 and that indels were distributed throughout the length of the protospacer (FIG. 19).

### Example 3. Characterization of miniCGBE1 and its Side by Side Comparison with CGBE1

[0173] We explored the impact of deleting the eUNG domain from the CGBE1 editor on its activity. This particular editor architecture, which we named miniCGBE1 (FIG. 22), had not been made or tested over the course of the stepwise progression from BE4max to CGBE1 and also has the added advantage of being smaller in size. Side-by-side comparisons of miniCGBE1 with CGBE1 at the same 25 sites we had previously tested showed that the frequencies of editing observed with miniCGBE1 were comparable but moderately lower at 6 out of 25 sites tested (mean editing frequencies across all 25 sites of 14.4% and 13% with CGBE1 and miniCGBE1, respectively), whereas the indel frequencies induced by miniCGBE1 were lower at 15 out of 25 sites (mean indel frequencies of 10.4% and 8.5% for CGBE1 and miniCGBE1, respectively; FIG. 22-24).

[0174] To more fully characterize the positional preferences within the editing windows of CGBE1 and miniCBGE1, we tested these two editors side-by-side with BE4max and BE4max(R33A) using 23 additional gRNAs that target sites with cytosines at protospacer positions 4, 5, 7, and 8 (FIG. 25). The targets of these 23 gRNAs included six sites with a C5, five with a C7, four with a C8, and eight with two Cs at various positions (C4 and C7, C4 and C8, C5 and C7, C5 and C8, and C7 and C8). Mean editing frequencies induced by miniCGBE1 were comparable to those of CGBE1: 1.7% and 1.5% at C4, 7.3% and 6.7% at C5, 16.0% and 13.5% at C7 and 3.4% and 2.9% at C8 for CGBE1 and miniCGBE1, respectively (FIG. 25). In addition, indel frequencies induced by CGBE1 and miniCGBE1 were comparable at 10 sites, lower with CGBE1 at five sites, and lower with miniCGBE1 at eight sites (FIG. 26). Collectively, our testing of CGBE1 and miniCGBE1 with 48 different gRNAs demonstrates that both have an optimal editing window for cytosines at positions 5-7 in the protospacer with those at position 6 being edited most efficiently (FIG. 27). This finding is consistent with our previously published studies showing that a CBE with the APOBEC1-R33A variant edits optimally on positions 5-7 of the protospacer and more weakly on positions 4 and 87.

### Example 4. Evaluation of DNA Off-Target Editing Induced by CGBE

[0175] Cas9-dependent DNA off-target profiles of CGBEs was assessed by transfecting HEK 293T cells with nCas9 control, BE4max, BE4max(R33A), CGBE1, and miniCGBE1 using HEK site 2, HEK site 3, HEK site 4, EMX1 site 1, and FANCF site 1 gRNAs. 23 genomic sites that have previously been described as known off-target sites for said gRNAs (Tsai et al, NBT 2014) were sequenced with NGS to detect potential off-target base editing of CGBE constructs. BE4max induced C-to-D (D=A, G, or T) edits at 15 of the 23 off-target sites with BE4max-R33A inducing edits less efficiently at all 15 sites, consistent with previously published observations that introduction of R33A reduces Cas9-dependent DNA off-target edits by the BE3 CBE (FIG. 28). Similarly, both CGBE1 and miniCGBE1 showed lower C-to-D off-target editing at 14 out of the 15 off-target sites that were edited by BE4max (FIG. 28). As expected, off-target indel frequencies were higher with CGBE1 and miniCGBE1 relative to BE4max at 18 out of 23 sites, although miniCGBE1 again showed reduced activity compared with CGBE1 at 14 out of these 18 sites (FIG. 28). Overall, this assessment of Cas9/gRNA-dependent DNA off-target editing shows that CGBE1 and miniCGBE1 induce fewer off-target DNA edits than BE4max, that CGBE-induced indels can occur at off-target sites, and that indels are reduced with miniCGBE1 relative to CGBE1.

### Example 5. CGBEs with SpCas9-NG and SpCas9-VRQR Variants of are Functional

[0176] We tested whether we could improve the somewhat more restricted targeting range of CGBEs by using previously described SpCas9-NG and SpCas9-VRQR variants that recognize shorter NG¹⁹ and alternative NGA²⁰ PAMs, respectively. We targeted six sites with NGT PAMs using modified CGBE1-NG and miniCGBE1-NG variants and six sites with NGAG PAMs using CGBE1-VRQR and miniCGBE1-VRQR variants. Each of these 12 new sites have a cytosine at position 6 embedded within an AT-rich sequence context to provide an optimal target for C-to-G editing (FIG. 30). On these target sites, CGBE1-NG and miniCGBE1-NG induced C-to-G edits with frequencies as high as 27% and 26%, respectively, and CGBE1-VRQR and miniCGBE1-VRQR induced C-to-G edits with frequencies of up to 31% (FIG. 30). These results show that the targeting range of CGBE constructs can be expanded by using Cas9 variants with altered or relaxed PAM recognition specificities.

### Example 6. Comparison of CGBEs with Prime Editor Technologies

[0177] We compared our CGBEs with Prime Editing (PE) methods that can introduce a diverse range of different edits and that were published15 while we were completing this project. The PE2 system uses two components: (1) a Prime Editor fusion protein and (2) a prime editing gRNA (pegRNA) (FIG. 32).²¹A more efficient PE3 system adds a secondary “nicking gRNA” (ngRNA) that directs a nick to the DNA strand opposite the edited one, thereby increasing editing efficiency (FIG. 32).²¹ We performed side-by-side comparisons of our CGBEs with PE2 and PE3 systems for making four different C-to-G edits, assessing frequencies of these alterations across four different human cell lines (HEK293T, K562, U205, and HeLa cells). Positive control experiments we performed in all four cell lines re-confirmed that two other previously described pegRNAs could induce a G-to-T transversion in FANCF site 1 and a CTT insertion in HEK site 3 (CTT-insertion), that PE3 is more efficient than PE2, and that the highest prime edit frequencies were observed in HEK293T cells (FIG. 33). For all four C-to-G edits (which we had already established could be efficiently induced by our CGBEs in HEK293T cells), we found that both PE2 and PE3 were substantially less efficient than CGBE and miniCGBE1 across all four cell lines (FIGS. 34 & 36). Importantly, these data also establish that our CGBEs can function robustly and efficiently across multiple human cancer cell lines. In addition, we found that the frequencies of unwanted indels were lower with prime editors compared to the CGBEs in all four cell lines (FIG. 37). To rule out that the pegRNAs and ngRNAs we designed were inactive or unable to interact with Cas9, we tested their abilities to induce Cas9-mediated indels at their intended target sites in HEK293T cells (note that we could not assess the activity of the HEK site 3 ngRNA due to its overlap with a required PCR primer). The indel frequencies we observed with these pegRNAs and ngRNAs were comparable to those used with the two positive control target sites (FIG. 35).

### Example 7. mRNA and RNP Production of CGBEs and Testing in Primary Human CD34+ and T Cells

[0178] CGBE architectures described in FIGS. 6-9 will be tested in primary human CD34+ and T cells by electroporating CGBE mRNAs (produced via IVT or by TriLink). CGBE constructs will be subcloned into pET vectors with an N-terminal 6×His-tag and codon-optimized for expression in E. coli to enable protein purification. RNPs will be electroporated with a Lonza device into HEK293T and primary human T cells to determine if CGBE RNP delivery yields efficient ex vivo DNA transversion base editing.

### Example 8. Evaluation of RNA Off-Target Editing Induced by CGBE

[0179] Unbiased detection of RNA off-target editing with the help of RNA-seq will be assessed. Cells will be transfected with two different gRNAs and CGBE constructs that are co-translationally expressed with P2A-EGFP in 15 cm dishes and trypsinized 36 hours post-transfection. Subsequently, GFP+ cells will be sorted on a BD FACSAria II and lysed to harvest both DNA and RNA. After efficient on-target editing is confirmed via targeted amplicon sequencing, RNA-seq will be performed using a TruSeq stranded total RNA library prep and sequencing on a NextSeq 500 machine at the MGH or a NovaSeq at the Broad Institute.

### Example 9. Evaluation of UNG Recruitment Strategy Using Peptide Aptamers

[0180] Next generation CGBE constructs fused with the candidate peptide aptamers will be assessed by transfection experiments, for example, those using lipofection and nucleofection techniques into human cells such as HEK 293T, U2OS and K562 cell lines. The transfections will be carried out with gRNA constructs with spacer sequences targeting human genomic loci having cytosines in the editing windows that is generated by our CGBE constructs. 72 hours post-transfection, genomic DNA (gDNA) will be harvested, and target loci will be PCR amplified. PCR amplicons will be subjected to targeted next generation sequencing (NGS) to quantify on-target editing efficiencies. The DNA off-target activities of the next generation CGBE constructs will be assessed by analyzing the top in-silico predicted candidate off-target sites using targeted amplicon sequencing (NGS) using the treated gDNAs. In order to assess the potential RNA off-target activities of our next generation CGBE constructs, we will be harvesting total RNA in parallel in the treated cells in order to conduct stranded libraries for transcriptome-wide analysis via RNA sequencing (RNA-seq).

### Example 10. Evaluation of UNG Recruitment Strategy Using RNA Aptamers

[0181] The next generation CGBE constructs will be analyzed using RNA aptamers fused to the gRNA in a series of transfection experiments (using, for example, lipofection and nucleofection techniques) in human cells such as HEK 293T, U2OS and K562 cell lines. The transfections will be carried out with fusion gRNA constructs with spacer sequences targeting human genomic loci having cytosines in the editing windows generated by our CGBE constructs. 72 hours post-transfection, genomic DNA (gDNA) will be harvested, and target loci will be PCR amplified. PCR amplicons will be subjected to targeted next generation sequencing (NGS) to quantify on-target editing efficiencies. In order to test the potential DNA off-target activities of our next generation CGBE constructs, the top in-silico predicted candidate off-target sites will be analyzed with targeted amplicon sequencing (NGS) using the treated gDNAs. In order to assess the potential RNA off-target activities of our next generation CGBE constructs, we will be harvesting total RNAs in parallel in the treated cells in order to conduct transcriptome-wide analysis via RNA sequencing (RNA-seq).

### Example 11. Evaluation of UNG Recruitment Strategy Using Fabs, scFVs or sdABs

[0182] Next generation CGBE constructs fused with the candidate Fab, scFv, or sdAb, will be assessed in a series of transfection experiments (e.g., using lipofection or nucleofection techniques) in human cells such as HEK 293T, U2OS and K562 cell lines. The transfections will be carried out with gRNA constructs with spacer sequences targeting human genomic loci having cytosines in the editing windows generated by CGBE constructs. 72 hours post-transfection, genomic DNA (gDNA) will be harvested, and target loci will be PCR amplified. PCR amplicons will be subjected to targeted next generation sequencing (NGS) to quantify on-target editing efficiencies. DNA off-target activities of the next generation CGBE constructs will be assessed by analyzing the top in silico predicted candidate off target sites using targeted amplicon sequencing (NGS). In order to assess the potential RNA off-target activities of our next generation CGBE constructs, we will be harvesting total RNA in parallel in the treated cells in order to conduct transcriptome-wide analysis via RNA sequencing (RNA-seq).

### REFERENCES

[0183] 1. Komor, A. C., Kim, Y. B., Packer, M. S., Zuris, J. A. & Liu, D. R. Programmable editing of a target base in genomic DNA without double-stranded DNA cleavage. Nature 533, 420-424 (2016).
[0184] 2. Nishida, K. et al. Targeted nucleotide editing using hybrid prokaryotic and vertebrate adaptive immune systems. Science (80-). (2016). doi:10.1126/science.aaf8729
[0185] 3. Gaudelli, N. M. et al. Programmable base editing of AT to GC in genomic DNA without DNA cleavage. Nature 551, 464-471 (2017).
[0186] 4. Rees, H. A. & Liu, D. R. Base editing: precision chemistry on the genome and transcriptome of living cells. Nat. Rev. Genet. (2018). doi:10.1038/s41576-018-0059-1
[0187] 5. Grünewald, J. et al. Transcriptome-wide off-target RNA editing induced by CRISPR-guided DNA base editors. Nature (2019). doi:10.1038/s41586-019-1161-z
[0188] 6. Zhou, C. et al. Off-target RNA mutation induced by DNA base editing and its elimination by mutagenesis. Nature 571, 275-278 (2019). Rees, H. A., Wilson, C., Doman, J. L. & Liu, D. R. Analysis and minimization of cellular RNA editing by DNA adenine base editors. Sci. Adv. 5, eaax5717 (2019).
[0189] 8. Koblan, L. W. et al. Improving cytidine and adenine base editors by expression optimization and ancestral reconstruction. Nat. Biotechnol. (2018). doi:10.1038/nbt.4172
[0190] 9. Thuronyi, B. W. et al. Continuous evolution of base editors with expanded target compatibility and improved activity. Nat. Biotechnol. (2019). doi:10.1038/s41587-019-0193-0
[0191] 10. Shinmura, K. et al. Aberrant Expression and Mutation-Inducing Activity of AID in

[0192] Human Lung Cancer. Ann. Surg. Oncol. 18, 2084-2092 (2011).
[0193] 11. Gannon, H. S. et al. Identification of ADAR1 adenosine deaminase dependency in a subset of cancer cells. Nat. Commun. 9, 5450 (2018).
[0194] 12. Weeks, L. D., Fu, P. & Gerson, S. L. Uracil-DNA glycosylase expression determines human lung cancer cell sensitivity to pemetrexed. Mol. Cancer Ther. 12, 2248-60 (2013).
[0195] 13. Xin, H., Wan, T. & Ping, Y. Off-Targeting of Base Editors: BE3 but not ABE induces substantial off-target single nucleotide variants. Signal Transduct. Target. Ther. 4, 9 (2019).
[0196] 14. Grünewald, J. et al. Transcriptome-wide off-target RNA editing induced by CRISPR-guided DNA base editors. Nature 569, 433-437 (2019).
[0197] 15. Komor, A. C. et al. Improved base excision repair inhibition and bacteriophage Mu Gam protein yields C: G-to-T: A base editors with higher efficiency and product purity. Sci. Adv. 1-10 (2017).
[0198] 16. Kim, Y. B. B. et al. Increasing the genome-targeting scope and precision of base editing with engineered Cas9-cytidine deaminase fusions. Nat. Biotechnol. 35, 371-376 (2017).
[0199] 17. Gehrke, J. M. et al. An APOBEC3A-Cas9 base editor with minimized bystander and off-target activities. Nat. Biotechnol. (2018). doi:10.1038/nbt.4199
[0200] 18. Wang, X. et al. Efficient base editing in methylated regions with a human APOBEC3A-Cas9 fusion. Nat. Biotechnol. 36, (2018).
[0201] 19. Nishimasu, H. et al. Engineered CRISPR-Cas9 nuclease with expanded targeting space. Science (80-). 361, 1259-1262 (2018).
[0202] 20. Kleinstiver, B. P. et al. High-fidelity CRISPR-Cas9 nucleases with no detectable genome-wide off-target effects. Nature 529, 490-495 (2016).
[0203] 21. Anzalone, A. V. et al. Search-and-replace genome editing without double-strand breaks or donor DNA. Nature 576, 149-157 (2019).

EXEMPLARY SEQUENCES

SEQ ID NO: 1
>tr|G3U0R4|G3U0R4_LOXAF Apolipoprotein B mRNA editing enzyme catalytic subunit 1
OS = Loxodonta africana = african elephant OX = 9785 GN = APOBEC1 PE = 4 SV = 1
FRRRIKPWEFEIFFDPRQLRKETCLLYEIKWGTSHKVWRNSGQNTTKHVEVNFIEKFTSERK
LCPSISCSITWFLSWSPCWECSKAIREFLRQHPNVTLVIYVARLFHHMDQRNRQGLKDLILS
GITVQIMRVSEYHHCWRNFVSYSPGEETYWPRYPPLWMMMYALELHCIILSLPPCLKISRR
CQHQLTLFSLTPQKCHYQMIPPYILLATGLIEPPMTWR
SEQ ID NO: 2
>tr|A0A0M3N0G8|A0A0M3N0G8_PROAN APOBEC-1 OS = Protopterus annectens OX = 7888
PE = 2 SV = 1
MVQKRTSASKTRMTKKVLLSEYQKFYYSPRTCIGYVIQYDEDNVIFQNWICNKRTTHAELQC
IYEIKQNSLIKRFTPCTLKWYMSWTPCSECANEIIRFLNKFCQVKLEICAARIYFHKK
KDNRRALRNLVKAGVKLTTMRWKDYKSMWRRFGTGEEIKKYEFFEKSSDHKSVNWRWTL
KKILKEKDRDSDLENALSLLKI
SEQ ID NO: 3
>tr|A0A151P6M4|A0A151P6M4_ALLMI C->U-editing enzyme APOBEC-1 OS = Alligator
mississippiensis OX = 8496 GN = APOBEC1A PE = 4 SV = 1
MAVEEEKGLLGTSQGWKIELKDFQENYMPSTWPKVTHLLYEIRWGKGSKVWRNWCSNTL
TQHAEVNCLENAFGKLQFNPPVPCHITWFLSWSPCCQCCRRILQFLRAHSHITLVIKAAQLF
KHMDERNRQGLRDLVQSGVHVQVMDLPDYRYCWRTFVSHPHEGEGDFWPWFFPLWITF
YTLELQHILLQQHALSYNL
SEQ ID NO: 4
>tr|F1CGT0|F1CGT0_ANOCA Apolipoprotein B mRNA-editing enzyme 1a isoform
(Fragment) OS = Anolis carolinensis OX = 28377 PE = 2 SV = 1
KAAILLSNLFFRWQMEPEAFQRNFDPREFPECTLLLYEIHWDNNTSRNWCTNKPGLHAEEN
FLQIFNEKIDIKQDTPCSITWFLSWSPCYPCSQAIIKFLEAHPNVSLEIKAARLYMHQI
DCNKEGLRNLGRNRVSIMNLPDYRHCWTTFVVPRGANEDYWPQDFLPAITNYSRELDSILQ
D
SEQ ID NO: 5
>tr|A0A091EQ78|A0A091EQ78_CORBR C->U-editing enzyme APOBEC-1 (Fragment)
OS = Corvus brachyrhynchos OX = 85066 GN = N302_10757 PE = 4 SV = 1
RWKIEPGDFQINYSPSQHRRGVYLLYEIRWRRGSIWRNWCSNTHRQHAEVNFLENCFKDR
PQVPCSITWFLSASPCGKCSKRILEFLKSRPYVTLKIYAAKLFRHHDIRNREGLCNLGMHGV
TIHIMNLEDYSYCWRNFVVY
SEQ ID NO: 6
>tr|A0A091IIG0|A0A091IIG0_CALAN C->U-editing enzyme APOBEC-1 (Fragment)
OS = Calypte anna OX = 9244 GN = N300_12023 PE = 4 SV = 1
RWKIQPNDFKRNYQPGRRPNWYLLYEIRWRRGTIWRNWCSNEFPQHAEDNFFQNRFNA
VPSVSCSITWFLSTTPCGRCSKRILEFLRLHPNVTLKIYAARLFRHLDNRNRQGLRKLASNG
VIIQIMGLPDYSYSWKKFVAY
SEQ ID NO: 7
>tr|A0A2U4ALA1|A0A2U4ALA1_TURTR C->U-editing enzyme APOBEC-1 isoform X1
OS = Tursiops truncatus OX = 9739 GN = APOBEC1 PE = 4 SV = 1
MIICWSTGPSAGDATLRRRIEPWEFEVSFDPRELSKETRLLYEIKWGKSQRIWRHSGKNTT
KHVERNFIEQITSERRFHRSVSCCIIWFLSWSPCWECSEAIREFLKQHPRVTLLIYVARLFQH
MDPRNRQGLRDLTHSGVTIQIMGPTEYDYCWRYFVNYAPGKEAHWPRYPPLLMKLYALEL
HCIILGLPPCLNISRYQNQLTLFRPILRNCHYQMIPPHILLHTGLIQLPLTWR
SEQ ID NO: 8
>tr|A0A093FY71|A0A093FY71_TYTAL C->U-editing enzyme APOBEC-1 (Fragment)
OS = Tyto alba 0X = 56313 GN = N341_11998 PE = 4 SV = 1
RWKIQPNDFKRNFLPGQHPKVVYLMYEIRWIRGTAWRSWCSNNSKQDAEVNLLENCFKA
MPSVFCSVTWVLFTTPCGKCFRRILEFLRVHSNVALERYAAQLFRHLDICNWQGIRSLAMN
GVIIHIMNLADYSYCWKRFVAY
SEQ ID NO: 9
>tr|L5KGJ8|L5KGJ8_PTEAL C->U-editing enzyme APOBEC-1 OS = Pteropus alecto
OX = 9402 GN = PAL_GLEAN10015600 PE = 4 SV = 1
MWVLFDILISWSTGPSTGDPTLRRRIEPWEFEVFFDPRELRKEACLLYEIQWGTSHKIWRNS
GKNTTKHVELNFIEKFTSERHFCSSVSCSIIWFLSWSPCWECSKAIREFLSQRPTVTLVIFVS
RLFQHMDQQNRQGLRDLINSGVTIQIMRASEYDHCWRNFVNYPPGKEAHWPRYPPLWMK
LYALELHCIILSLPPCVMISRRCQKQLTLFTLILKKCHYQMIPAHILLATGLIQVPVTWR
SEQ ID NO: 10
>tr|A0A2K6KS69|A0A2K6KS69_RHIBE CMP/dCMP-type deaminase domain-containing
protein OS = Rhinopithecus bieti OX = 61621 GN = APOBEC1 PE = 4 SV = 1
MTSEKGPSTGDPTLRRRIEPWEFDIFYDPRELRKEACLLYEIKWGMSWKIWRSSGKNTTNH
VEVNFIEKFTSERRFHSSISCSITWFLSWSPCWDCSQAIRKFLSQHPGVTLVIYVARLFWHT
DQQNRQGLRDLVNSGVTIQMMTASEYYHCWRNFVNYPPGEEAHWPRYPPLWMMLYALE
LHCIILSLPPCLKISRRWQNHLTFFRLHLQNCHYQTIPPHILLATGLIQPSVTWR
SEQ ID NO: 11
>tr|A0A2Y9NGP5|A0A2Y9NGP5_DELLE C->U-editing enzyme APOBEC-1 isoform X1
OS = Delphinapterus leucas OX = 9749 GN = APOBEC1 PE = 4 SV = 1
MIICWSTGPSAGDATSRRRIEPWEFEVSFDPRELCKETRLLYEIKWGKSQHVWRHSDKNTT
KHVECKFIEKITSERHFHPSVSCCIIWFLSWSPCWECSKAIREFLNQHPRVTLFIYVARLFQH
MDPQNRQGLRDLIHSGVTIHVMGPTEYDYCWRNFVNYPPGKEAHWPRYPPMLMKLYALE
LHCIILGLPPCLNISRYQNQLTLFRLIPQNCHYRMIPPHILLHRGLIRLPLTWR
SEQ ID NO: 12
>tr|A0A218ULD2|A0A218ULD2_9PASE C->U-editing enzyme APOBEC-1 OS = Lonchura
striata domestica OX = 299123 GN = APOBEC1 PE = 4 SV = 1
MYRRKMRGMYISKRALRKHFDPRNYPRETYLLCELQWRGSHKSWQHWLRNDDSKDCHA
EKYFLEEIFEPRSYNICDMTWYLSWSPCGECCDIIQDFLEEQPNVNINIRIARLYYADRASNR
RGLMELANSPGVSIEIMDADDYNDCWETFIQPGVYYRFSPENFESAIRRNCSQLEDILQGLH
L
SEQ ID NO: 13
>tr|A0A0Q3WRD0|A0A0Q3WRD0_AMAAE C->U-editing enzyme APOBEC-1 OS = Amazona
aestiva OX = 12930 GN = AAES_27783 PE = 4 SV = 1
MLPAPAPVPLVLPLQGGGVVVVTVGVXPTALLQPSGAPEVARTFVGAVIAFVIAEYVDTSVS
EDTTICGMYIPKEALKYHFDPREVXRDTYLLCILRWGETGTPWSHWVKNYRYHAEVYFLEKI
FQTRKSSKNINCSITWYLSWSPCAKCCRKILNFLKKHSYVSIKIHVARLFRIDDKETXQNLKN
LGSLVGVTVSVMEXEDYTNCWKTFIRGHADGDSWIDDLKSEIRKNRLKFQGIFKDLPHQTE
DVDFWLILAANPGPAWFSFSGYTGWAVASKAPSLLSPLSCLTRLLTP
SEQ ID NO: 14
>tr|A0A2K6U925|A0A2K6U925_SAIBB Apolipoprotein B mRNA editing enzyme catalytic
subunit 1 OS = Saimiri boliviensis boliviensis OX = 39432 GN = APOBEC1 PE = 4
SV = 1
MTSERRRIEPWEFSISYDPRELCKETCLLYEIKWGMSWKIWRSSGKNTTNHVEVNFIEKFTS
ERHFHSSVSCSITWFLSWSPCWECSQAIREFLSQHPGVTLVIYVARLFQHMDQQNRQGLR
ELVNSGVTIQIMTASEYYHCWRNFVNYPPGEEAHWPRHPPLWMMLYALELHCIIL
SEQ ID NO: 15
>tr|A0A2R9A0R0|A0A2R9A0R0_PANPA CMP/dCMP-type deaminase domain-containing
protein OS = Pan paniscus OX = 9597 GN = APOBEC1 PE = 4 SV = 1
ISWSTGPSTGDPTLRRRIEPWEFDVFYDPRELRKEACLLYEIKWGMSRKIWRSSERDFHPSI
SCSITWFLSWSPCWECSQAIREFLSQHPGVTLVIYVARLFWHMDQQNRQGLRDLVNSGVTI
QIMTASEYYHCWRNFVNYPPGDEAHWPQYPPLWMMLYALELHCIILSLPPCLKISRRWQN
HLTFFSLHLQNCHYQTIPPHILLATGLIHPSVAWR
SEQ ID NO: 16
>sp|Q694B3|ABEC1_PONPY C->U-editing enzyme APOBEC-1 OS = Pongo I
OX = 9600 GN = APOBEC1 PE = 3 SV = 2
MTSEKGPSTGDPTLRRRIESWEFDVFYDPRELRKETCLLYEIKWGMSRKIWRSSGKNTTNH
VEVNFIKKFTSERRFHSSISCSITWFLSWSPCWECSQAIREFLSQHPGVTLVIYVARLFWHM
DQRNRQGLRDLVNSGVTIQIMRASEYYHCWRNFVNYPPGDEAHWPQYPPLWMMLYALEL
HCIILSLPPCLKISRRWQNHLAFFRLHLQNCHYQTIPPHILLATGLIHPSVTWR
SEQ ID NO: 17
>tr|E1BP99|E1BP99_BOVIN Apolipoprotein B mRNA editing enzyme catalytic subunit 1
OS = Bos taurus OX = 9913 GN = APOBEC1 PE = 4 SV = 1
MASDRGPPAGDPTLRRRIEPWEFEFSFDPRKFCKEACLLYEIQWGNNRDVWRHSGKNTTK
HVERNFIEKIASERYFCPSIRCFIFWYLSWSPCWECSKAIREFLNQHPNVTLVIYIARLFQHM
DPQNRQGLKDLVQSGVTIQVMRAPEYEYCWRNFVNYPRGKEAHWPRYPPLWMNLYALEL
YCIILGLPPCLHISRRYQNQLIVFRLTLQNCHYQMIPPYILLATGMVQLPMTWR
SEQ ID NO: 18
>tr|S7PYX0|S7PYX0_MYOBR C->U-editing enzyme APOBEC-1 OS = Myotis brandtii
OX = 109478 GN = D623_10002956 PE = 4 SV = 1
MDEQNRQGLRDLIKSGVTVQIMTTPEYDYCWRNFVNYPPGKDTHCPMYPPLWMKLYALEL
HCIILSLPPCLMISRRCQKQLTWYRLNLQNCHYQQIPHHILLATVWI
SEQ ID NO: 19
>tr|M3WB96|M3WB96_FELCA Apolipoprotein B mRNA editing enzyme catalytic subunit 1
OS = Felis catus OX = 9685 GN = APOBEC1 PE = 4 SV = 2
MASDKGPSAGDATLRRRIEPREFEVFFDPRELRKEACLLYEIKWGTSHRIWRNSGRNTANH
VELNFIEKFTSERHFCPSVSCSITWFLSWSPCWECSKAIRGFLSQHPSVTLVIYVSRLFWHL
DQQNRQGLRDLVNSGVTVQIMRVPEYDHCWRNFVNYPPGEEDHWPRYPVVWMKLYALE
LHCIILSLPPCLKILRRCQNQLTLFRLTLQNCHYQMIPPHILLATGLIQLPVTWR
SEQ ID NO: 20
>tr|A0A2K5PZC0|A0A2K5PZC0_CEBCA CMP/dCMP-type deaminase domain-containing
protein OS = Cebus capucinus imitator OX = 1737458 GN = APOBEC1 PE = 4 SV = 1
MTSERGPSTGDPTLRRRIEPWEFYISYDPKELCKETCLLYEIKWGMSWKIWRSSGKNTTNH
VEVNFIEKFTSERRFHSSISCSITWFLSWSPCWECSQAIREFLSQHPGVTLVIYVARLFQHM
DQQNRQGLRDLVNSGVTIQIMRASEYYYCWRNFVNYPPGEEAHWPRHPPLWMMLYALEL
HCIILGLPPCLKISRRRQNRLTFFRLHLQNCHYQMIPPHILLAAGLIQPSVTWR
SEQ ID NO: 21
>tr|H2Q5C6|H2Q5C6_PANTR Apolipoprotein B mRNA editing enzyme catalytic subunit 1
OS = Pan troglodytes OX = 9598 GN = APOBEC1 PE = 4 SV = 1
MTSEKGPSTGDPTLRRRIEPWEFDVFYDPRELRKEACLLYEIKWGMSRKIWRSSGKNTTN
HVEVNFIKKFTSERHFHPSISCSITWFLSWSPCWECSQAIREFLSQHPGVTLVIYVARLFWH
MDQQNRQGLRDLVNSGVTIQIMRASEYYHCWRNFVNYPPGDEAHWPQYPPLWMMLYAL
ELHCIILSLPPCLKISRRWQNHLTFFSLHLQNCHYQTIPPHILLATGLIHPSVAWR
SEQ ID NO: 22
>tr|A0A1U7S7K7|A0A1U7S7K7_ALLSI C->U-editing enzyme APOBEC-1-like OS = Alligator
sinensis OX = 38654 GN = LOC102373005 PE = 4 SV = 1
MGEHWQYAGSGEYIPQDQFEENFDPSVLLAETHLLSELTWGGRPYKHWYENTEHCHAEIH
FLENFSSKNRSCTITWYLSWSPCAECSARIADFMQENTNVKLNIHVARLYLHDDEHTRQGL
RYLMKMKRVTIQVMTIPDYTYCWNTFLEDDGEDESDDYGGYAGVHEDEDESDDDDYLPTH
FAPWIMLYSLELSCILQGFAPCLKIIQGNHMSPTFQLHVQDQEQKRLLEPANPWGAD
SEQ ID NO: 23
>tr|G3HS7|G3HS7_CRIGR C->U-editing enzyme APOBEC-1 OS = Cricetulus griseus
OX = 10029 GN = I79_017346 PE = 4 SV = 1
MTEQEYCYCWRNFVNYPPSNEVYWPRYPNVWMRMYALELYCIVLGLPPCLKIIRRHQHPL
TFFTLHLQSCHYQRIPPHILWATGLV
SEQ ID NO: 24
>tr|A0A094MFH1|A0A094MFH1_ANTCR C->U-editing enzyme APOBEC-1 (Fragment)
OS = Antrostomus carolinensis OX = 279965 GN = N321_09417 PE = 4 SV = 1
RWKMQPNDFKRNYLPVQYPNMVYLLYEIRWSTGTIWRNWCSNNSTQHAEVNFLENRFNS
RPSVSCSITWVLSTTPCGKCSTKILEFLRLHPNVTLKIYAAKLFKHLDIRNRQGLRNLAMNGV
IIRIMNLADYSYCWKTFVAY
SEQ ID NO: 25
>tr|A0A2K6EVT9|A0A2K6EVT9_PROCO CMP/dCMP-type deaminase domain-containing
protein OS = Propithecus I OX = 379532 GN = APOBEC1 PE = 4 SV = 1
MTSEKRRIEPWEFEAFFDPRELRKEACLLYEIKWGASHKIWRNTGKSTTRHVEVNFIEKFTS
ERRSDSLISCSITWFLSWSPCWECSKAIREFLSQHPNVTLVIYVARLFWHMNQQNRQGLRD
LINSGVTVQIMGVSEYCHCWRNFVNYPPGKEASCPTYPPLWMTLYALELHCIILSLPPCLKIS
RRCQNQLTFFRLTPQNCHYQTIPPHILLATGLIQPSVTWR
SEQ ID NO: 26
>tr|G8F4P7|G8F4P7_MACFA C->U-editing enzyme APOBEC-1 (Fragment) OS = Macaca
fascicularis OX = 9541 GN = EGM_20518 PE = 4 SV = 1
GPSTGDPTLRRRIEPWEFDIFYDPRELRKEACLLYEIKWGMSPKIWRSSGKNTTNHVEVNFI
EKLTSERRFHSSISCSITWFLSWSPCWECSQAIREFLSQHPGVTLVIYVARLFWHTDQQNR
QGLRDLVNSGVTIQIMRASEYYHCWRNFVNYPPGEEAHWPRYPPLWMMLYALELHCIILSL
PPCLKISRRWQNHLTFFRLHLQNCHYQMIPPHILLATGLIQPSVTWR
SEQ ID NO: 27
>tr|A0A091V7F8|A0A091V7F8_NIPNI C->U-editing enzyme APOBEC-1 (Fragment)
OS = Nipponia nippon OX = 128390 GN = Y956_13652 PE = 4 SV = 1
RWKIQPNDFRSNYLPCQHPRVVYLLYEIRWSRGTIWRNWCSNNSTQHAEVNFLENCFKAM
PSVPCSITWVLSTTPCGKCSRRILEFLRVHPNVTLEIYAAKLFKHLDIRNRQGLRNLAKNGVV
IRIMKLADYSYWWKRFVAY
SEQ ID NO: 28
>tr|A0A091SSF0|A0A091SSF0_PELCR C->U-editing enzyme APOBEC-1 (Fragment)
OS = Pelecanus crispus OX = 36300 GN = N334_11718 PE = 4 SV = 1
RWKLQPEDFKRNYLPGQHPKVVYLLYEIRWSRGTIWRSWCSNNSKQHAEVNFLENCFKAR
PSVSCSITWVLSTTPCGKCSRRILEFLRVHPNVTLEIYAAKLFKHLDIRNQQGLRNLAMNGVII
RIMNLADYSYCWKRFVAH
SEQ ID NO: 29
>tr|A0A091CVE5|A0A091CVE5_FUKDA C->U-editing enzyme APOBEC-1 OS = Fukomys
damarensis OX = 885580 GN = H920_16562 PE = 4 SV = 1
MSDPEFCHCWRNFVNYPPGQEARWPRFPPVWTMLYTLELCCVLLNLPPCLKISRRCHNQL
AFFQLNLQNCHYRAIPPAVLFAVGLIHPFVAWA
SEQ ID NO: 30
>tr|L5LUG3|L5LUG3_MYODS C->U-editing enzyme APOBEC-1 OS = Myotis davidii
OX = 225400 GN = MDA_GLEAN10003736 PE = 4 SV = 1
MASDAGKMDRGPVSFIVLKSVETLCVRRIEPWEFEAIFDPRELRKEACLLYEIKWGTGHKIW
RHSGKNTTRHVEVNFIEKITSERQFCSSTSCSIIWFLSWSPCWECSKAITEFLRQRPGVTLVI
YVARLYHHMDEQNRQGLRDLVKSGVTVQIMTTPEYDYCWRNFVNYPPGKDTHCPIYPPLL
MKLYALELHCIILSLPPCLMISRRCQKQLTWYRLNLQNCHYQQIPHHILLATAWI
SEQ ID NO: 31
>tr|F1PUJ5|F1PUJ5_CANLF Apolipoprotein B mRNA editing enzyme catalytic subunit 1
OS = Canis lupus familiaris OX = 9615 GN = APOBEC1 PE = 4 SV = 2
MASDKGPSAGDATLRRRIEPWEFEGFFDPRELRKETCLLYEIQWGTSHKTWRNSGKNTTN
HVEINFMEKFAAERQYCPSIRCSITWFLSWSPCWECSNAIRGFLSQHPSVTLVIYVARLFWH
TDPQNRQGLRDLINSGVTIQIMTVPEYDHCWRNFVNYPPGKEDHWPRYPVLWMKLYALEL
HCIILNLPPCLKISRRNQHQLTLFRLTLQDCHYQTIPPPILLDMGLIQPLVTWR
SEQ ID NO: 32
>tr|A0A093GVH6|A0A093GVH6_DRYPU C->U-editing enzyme APOBEC-1 (Fragment)
OS = Dryobates pubescens OX = 118200 GN = N307_04563 PE = 4 SV = 1
RWKIHPDEFKLNYVPVGRPRWYLLYEIRWSRGSIWRNWCSNSSTQHAEVNFLENCFKAM
PSVSCSITWFLSTTPCGNCSRRILEFLRAHPKVTLAIHAAKLFKHLDVRNRHGLKALATDGVV
LHIMSIADYRYCWTKFVAY
SEQ ID NO: 33
>tr|A0A2K5Z8Y4|A0A2K5Z8Y4_MANLE CMP/dCMP-type deaminase domain-containing
protein OS = Mandrillus leucophaeus OX = 9568 GN = APOBEC1 PE = 4 SV = 1
MTSEKGPSTGDPTLRRRIEPWEFDIFYDPRELRKEACLLYEIKWGMSPKIWRSSGKNTTNH
VEVNFIEKLTSERRFHSSISCSITWFLSWSPCWECSQAIREFLSQHPGVTLVIYVARLFWHT
DQQNRQGLRDLVNSGVTIQIMRASEYYHCWRNFVNYPPGEEAHWPRYPPLWMMLYALEL
HCIILSLPPCLKISRRQQNHLTFFRLHLQNCHYQTIPPHILLATGLIQPSVTWR
SEQ ID NO: 34
>tr|A0A087VMP5|A0A087VMP5_BALRE C->U-editing enzyme APOBEC-1 (Fragment)
OS = Balearica regulorum gibbericeps OX = 100784 GN = N312_10691 PE = 4 SV = 1
RWKIQPDDFKRNYLPGKHPRWYLLYEIRWSRGTIWRSWCSNNATQHAEINFLETCFLART
SVSCSITWVLSTTPCGKCSRRILEFLNAYPNVTLEIYAAKLFRHLDNRNRQGLRNLAMKGVR
IHIMNLADYSYFWKIFVAY
SEQ ID NO: 35
>tr|A0A087QNJ5|A0A087QNJ5_APTFO C->U-editing enzyme APOBEC-1 (Fragment)
OS = Aptenodytes forsteri OX = 9233 GN = AS27_08049 PE = 4 SV = 1
RWKIRPNDFKRNYLPGQHPKVVYLLYEIRWSRGTIWRNWCSNNSTQHAEVNFLENCFKAM
PSVSCSITWVLSTTPCGKCSRRILEFLRVHPNVTLEIYAAKLFKHLDIRNRQGLRNLAMNGVII
RIMNLADYSYGWKRFVAY
SEQ ID NO: 36
>tr|A0A2Y9IYV0|A0A2Y9IYV0_ENHLU C->U-editing enzyme APOBEC-1 OS = Enhydra lutris
kenyoni OX = 391180 GN = LOC111142361 PE = 4SV = 1
MASDKGPSAGDATLRRRIEPWEFEVFFDPRELRKEACLLYEIQWGTSHKMWRNTGKNTAN
HVELNFIEKFTSERRYCPSTHCSITWFLSWSPCWECCKAIRGFLSQHPSVTLVIYVTRLFWH
MDPQNRQGLRDLLKSGVTVQIMRAPEYDHCWKNFVNYPPGKEDHWPRYPELWMKLYELE
LYCIILSLPPCLKISRRNQNQLTLFRLTLQNCHYQIIPPHILLDTGLIQLPVIWR
SEQ ID NO: 37
>tr|B2NIW5|B2NIW5_MUSPF Apolipoprotein B mRNA editing protein OS = Mustela putorius
furo OX = 9669 GN = APOBEC1 PE = 2 SV = 1
MASDKGPSAGDATLRRRIEPWEFEVFFDPRELRKEACLLYEIQWGTSHKMWRNTGKNTAN
HVELNFIEKFTSERRYCPSTHCSITWFLSWSPCWECSKAIRGFLSQCPSVTLVIYVTRLFWH
MDPQNRQGLRDLLKSGVTVRIMRAPEYDHCWKNFVNYPPGKEDHWPRYPELWMKLYELE
LYCIILSLPPCLKISRRNQKQLTLFRLTLQNCHYQIIPPHILLDTGLIQLPVIWR
SEQ ID NO: 38
>tr|A0A2Y9E587|A0A2Y9E587_TRIMA C->U-editing enzyme APOBEC-1 OS = Trichechus
manatus latirostris OX = 127582 GN = LOC101361717 PE = 4 SV = 1
MTSEEADQRHSTMTSEKGPSTGDGTLRRRITPWEFEIFFDPRELRKETCLLYEIKWGTSHRI
WRNSGQNTTKHAEVNFIEKFTSERNFCPSVSCSITWFLSWSPCWECSKAIREFLSQHPNVI
LVIYVARLFHHMDQQNREGLRDLVLSGVTVQIMSVSEYGHCWRNFVNYPPGEEARWPRYP
PLWMMLYALELHCIILGLPPCLKISRRRQSQLTLFSLTPQNCHYQMIPPHILLATGLIQPYVTW
R
SEQ ID NO: 39
>tr|G1LKL4|G1LKL4_AILME CMP/dCMP-type deaminase domain-containing protein
OS = Ailuropoda melanoleuca OX = 9646 GN = APOBEC1 PE = 4 SV = 1
ISWSTGPSGGDATSRRRIEPWEFEVFFDPRQLRKEACLLYEIQWGTSRKIWRNSGKNTTNH
VEINFIEKFTLERQYCPSIHCSVTWFLSWSPCWECSKAIRAFLSQHPSVTLVIYVARLFWHM
EPQNRQGLRDLINSGVTIQIMSVPEYDHCWRNFVNYPPGKDHWPGYPVLWMKLYALELHC
IILSLPPCLKISRRNQNQLTLFRLTLQNCHYQTIPPHVLLATGLIQLPVTWR
SEQ ID NO: 40
>tr|A0A093PWR2|A0A093PWR2_9PASS C->U-editing enzyme APOBEC-1 (Fragment)
OS = Manacus vitellinus OX = 328815 GN = N305_14278 PE = 4 SV = 1
RWKIQPKDFKRNYLPGQHPQWYLLYEIRWRNGSIWRNWFSNNRNQHAEVNFLENCFSDV
PPAPCSITWFLSTSPCGKCSRRILEFLRTHRNVTLEIYAAKLFRHQDIRNRQGLCNLVMNGV
TIHIMNLADYSYCWKRFVAY
SEQ ID NO: 41
>sp|Q9EQP0|ABEC1_MESAU C->U-editing enzyme APOBEC-1 OS = Mesocricetus auratus
OX = 10036 GN = APOBEC1 PE = 2 SV = 1
MSSETGPVVVDPTLRRRIEPHEFDAFFDQGELRKETCLLYEIRWGGRHNIWRHTGQNTSR
HVEINFIEKFTSERYFYPSTRCSIVWFLSWSPCGECSKAITEFLSGHPNVTLFIYAARLYHHT
DQRNRQGLRDLISRGVTIRIMTEQEYCYCWRNFVNYPPSNEVYWPRYPNLWMRLYALELY
CIHLGLPPCLKIKRRHQYPLTFFRLNLQSCHYQRIPPHILWATGFI
SEQ ID NO: 42
>tr|A0A2K6PRF3|A0A2K6PRF3_RHIRO CMP/dCMP-type deaminase domain-containing
protein OS = Rhinopithecus roxellana OX = 61622 GN = APOBEC1 PE = 4 SV = 1
MSWKIWRSSGKNTTNHVEVNFIEKFTSERRFHSSISCSITWFLSWSPCWDCSQAIRKFLSQ
HPGVTLVIYVARLFWHTDQQNRQGLRDLVNSGVTIQMMTASEYYHCWRNFVNYPPGEEA
HWPRYPPLWMMLYALELHCIILSLPPCLKISRRWQNHLTFFRLRLQNCHYQTIPPHILLATGL
IQPSVTWR
SEQ ID NO: 43
>tr|A0A0D9RBS4|A0A0D9RBS4_CHLSB Apolipoprotein B mRNA editing enzyme catalytic
subunit 1 OS = Chlorocebus sabaeus OX = 60711 GN = APOBEC1 PE = 4 SV = 1
MSRKIWRSSGKNTTNHVEVNFIEKLTSERRFHSSVSCSVTWFLSWSPCWECSQAIREFLS
QHPGVTLVIYVARLFWHTDQQNRQGLRDLVNSGVTIQIMRASEYYHCWRNFVNYPPGEEA
HWPRYPPLWMMLYALELHCIILSLPPCLKISRRWQNHLTFFRLHLQNCHYQTIPPHILLATGL
IQPPVTWR
SEQ ID NO: 44
>tr|A0A286XNR2|A0A286XNR2_CAVPO CMP/dCMP-type deaminase domain-containing
protein OS = Cavia porcellus OX = 10141 GN = APOBEC1 PE = 4 SV = 1
MASGTGPSTGDATLRRRIEPWQFEAYFDPRQLRKEACMLSEVRWGASPRTWRESSLNTT
SHVEINFIEKFTSGRSLRPAVRCSMTWFLSWSPCWECARAIREFLHQHPNVSLVIYVARLY
WHVDEQNRQGLRDLVTSGVRVQIMSDSEYRHCWRNFVNFPPGQEAGWPRFPPMWTTLY
ALELSCILLSLPPCLKISRRRQYRLIVFQLILQTCHYRAIPPQVLSAAELMHPLVAWC
SEQ ID NO: 45
>tr|A0A2Y9HAT6|A0A2Y9HAT6_NEOSC C->U-editing enzyme APOBEC-1
OS = Neomonachus schauinslandi OX = 29088 GN = APOBEC1 PE = 4 SV = 1
MASDKGPSAGDATLRRRIKPWEFEVFFDPRELRKETCLLYEIQWGTSHKIWRNSGKNTAN
HVEINFIEKFTSERQYCPSIRCSITWFLSWSPCWECSKAIRGFLSQHPSVTLVIYVARLFWH
MDPQNRQGLRDLINSGVTIQIMRVPEYDHCWRNFVNYLPGKEDHWPRYPVLWMKLYALEL
HCIILSLPPCLRISRRQNQLTLFTLTLQNCHYQMIPPHILLATGLIQVPVTWK
SEQ ID NO: 46
>tr|A0A091XJL0|A0A091XJL0_OPIHO C->U-editing enzyme APOBEC-1 (Fragment)
OS = Opisthocomus hoazin OX = 30419 GN = N306_09750 PE = 4 SV = 1
RWKVQPNDFKRNYLPGQHPKVVYILYEIRWSRGTIWRNWCTNNSTQHAEVNFLENCFKAM
PSVSCSITWVLSTTPCGKCSKRIQDFLRIYPNVTLEIHAAKLFKHLDTRNREGLRNLAKDGVII
HIMNLADYSYWWKRFVAY
SEQ ID NO: 47
>tr|F6WR88|F6WR88_HORSE Apolipoprotein B mRNA editing enzyme catalytic subunit 1
OS = Equus caballus OX = 9796 GN = APOBEC1 PE = 4 SV = 2
MSHNIWRYSGKNTTKHVEINFIEKFTSERHLRPSISCSIVWFLSWSPCWECSKAIREFLS
QHPNVTLVIYVARLFQHMDRLNRQGLRDLINSGVTIQIMRTSEYDHCWRNFVNYPPGKEAH
WPRYPLLWMKLYALELHCIILSLPPCLMISRRCQNQLTFFRLTLQNCHYQMIPPHILLATGLV
QLPVTWR
SEQ ID NO: 48
>sp|P41238|ABEC1_HUMAN C->U-editing enzyme APOBEC-1 OS = Homo sapiens
OX = 9606 GN = APOBEC1 PE = 1 SV = 3
MTSEKGPSTGDPTLRRRIEPWEFDVFYDPRELRKEACLLYEIKWGMSRKIWRSSGKNTTN
HVEVNFIKKFTSERDFHPSMSCSITWFLSWSPCWECSQAIREFLSRHPGVTLVIYVARLFW
HMDQQNRQGLRDLVNSGVTIQIMRASEYYHCWRNFVNYPPGDEAHWPQYPPLWMMLYA
LELHCIILSLPPCLKISRRWQNHLTFFRLHLQNCHYQTIPPHILLATGLIHPSVAWR
SEQ ID NO: 49
>tr|A0A091RU17|A0A091RU17_NESNO C->U-editing enzyme APOBEC-1 (Fragment)
OS = Nestor notabilis OX = 176057 GN = N333_10787 PE = 4 SV = 1
RWKIQPNDFKRNYLPYQHPKVVCLLYEIRWNRGTIWRSWCSNNSTQHAEVNFLENCFKAK
PSVSCSITWVLSTTPCGECSRRILDFLSVYPNVTLKIYAAKLFKHLDNRNRQGLWNLANNRV
IIRIMNLEDYNYYWKRFVAY
SEQ ID NO: 50
>tr|A0A091IWL9|A0A091IWL9_EGRGA C->U-editing enzyme APOBEC-1 (Fragment)
OS = Egretta garzetta OX = 188379 GN = Z169_O8812 PE = 4 SV = 1
RWKIQPNDFKRNYLPGQHPKVVYLLYEIRWSRGTIWRNWCSNNSTQHAEVNFLENCFKAM
PSVSCSITWVLSTTPCGKCSRRILEFLRVHPSVTLEIYAAKLFKHLDIRNRQGLRNLAMNGVII
HIMNLADYSYWWKIFVAY
SEQ ID NO: 51
>tr|A0A2K5DG70|A0A2K5DG70_AOTNA CMP/dCMP-type deaminase domain-containing
protein OS = Aotus nancymaae OX = 37293 GN = APOBEC1 PE = 4 SV = 1
MTPEEEVQRQSTMTSERGPSTGDPTLRRRIEPWEFCISYDPKELCKETCLLYEIKWGTSWK
IWRSSGKNTTNHVEVNFIEKFMSERHFHSSISCSITWFLSWSPCWECSQAIREFLSRHPGV
TLVIYVARLFQHMDRQNRQGLRDLVNSGVTIQIMRASEYYHCWRNFVNYPPGEEAHWPRY
PPLWMMLYALELHCIILGLPPCLKISRRWQNRLTFFRLHLQNCHYQMIPQHILFATGLIQPPV
TWR
SEQ ID NO: 52
>sp|P51908|ABEC1_MOUSE C->U-editing enzyme APOBEC-1 OS = Mus I
OX = 10090GN = Apobec1 PE = 1 SV = 1
MSSETGPVAVDPTLRRRIEPHEFEVFFDPRELRKETCLLYEINWGGRHSVWRHTSQNTSN
HVEVNFLEKFTTERYFRPNTRCSITWFLSWSPCGECSRAITEFLSRHPYVTLFIYIARLYHHT
DQRNRQGLRDLISSGVTIQIMTEQEYCYCWRNFVNYPPSNEAYWPRYPHLWVKLYVLELY
CIILGLPPCLKILRRKQPQLTFFTITLQTCHYQRIPPHLLWATGLK
SEQ ID NO: 53
>tr|G5BPM8|G5BPM8_HETGA C->U-editing enzyme APOBEC-1 (Fragment)
OS = Heterocephalus glaber OX = 10181 GN = GW7_17308 PE = 4 SV = 1
RRRIEPWQFEASFDPRQLRRETCLLSEVRWGTSPRAWRGCSLNTARHAEVSFMDRLTSE
GRLRGPVRCSITWFLSWSPCGACAQAIGEFLRQHPNVSLVIYIARLFWHVDEQNRQGLRDL
VTRGVRMQVMSDPEFAHCWRNFVNYSPGQEARWPQVPPWVTWLYSLELHCILLNLPPCL
KISRRHHNQLTFFQLILQNCHYQAIPSPVLLASGLIHPFVTW
SEQ ID NO: 54
>tr|A0A091QEK6|A0A091QEK6_MERNU C->U-editing enzyme APOBEC-1 (Fragment)
OS = Merops nubicus OX = 57421 GN = N331_01832 PE = 4 SV = 1
RWKIEPDEFKTNYSPDHRPRVVYLLYEIRWRRGTIWRNWCSNNIDQHAEVNFLENCFKAK
PSVSCSITWFLSTAPCAKCSRRILKFLTAHPKVTLEIYAAKLFRHLEIRNRQGLMDLAVN
GVILRIMNLADYSYCWKQFVAY
SEQ ID NO: 55
>tr|A0A093LP85|A0A093LP85_FULGA C->U-editing enzyme APOBEC-1 (Fragment)
OS = Fulmarus glacialis OX = 30455 GN = N327_13724 PE = 4 SV = 1
RWKIQPNDFKRNFLPSKYPKVVYLLYEIRWSSGTIWRSWCSNNSTQHAEVNFLENCFKAM
PSVSCSITWVLPITPCGKCSKKILEFLSVHPNVTLEIYAAKLFRHLDIRNQQGLRNLAMN
GVIIRIMNLADYSYSWKRFVAY
SEQ ID NO: 56
>tr|G1QZV0|G1QZV0_NOMLE CMP/dCMP-type deaminase domain-containing protein
OS = Nomascus leucogenys OX = 61853 GN = APOBEC1 PE = 4 SV = 1
MTSEKGPSTGDPTLRRRIEPWEFDVFYDPRELRKEACLLYEIKWGMSQKIWRSSGKNTTN
HVEVNFIKKFTSEGRFQSSISCSITWFLSWSPCWECSQAIREFLSQHPGVTLVIYVARLF
WHMDQQNRQGLRDLVNSGVTIQIMRASEYYHCWRNFVNYPPGDEAHWPRYPPLWMMLY
AL
ELHCIILSLPPCLKISRRWQNHLTFFRLHLQNCHYQTIPPHILLATGLIHPSVTWR
SEQ ID NO: 57
>tr|A0A096MWB4|A0A096MWB4_PAPAN CMP/dCMP-type deaminase domain-containing
protein OS = Papio anubis OX = 9555 GN = APOBEC1 PE = 4 SV = 2
MTSEKGPSTGDPTLRRRIEPWEFDIFYDPRELRKEACLLYEIKWGMSPKIWRSSGKNTTN
HVEVNFIEKLTSERRFHSSISCSITWFLSWSPCWECSQAIREFLSQHPGVTLVIYVARLF
WHTDQQNRQGLRDLVNSGVTIQIMTASEYYHCWRNFVNYPPGEEAHWPRYPPLWMMLY
AL
ELHCIILSLPPCLKISRRWQNHLTFFRLHLQNCHYQTIPPHILLATGLIQPSVTWR
SEQ ID NO: 58
>sp|Q9TUI7|ABEC1_MONDO C->U-editing enzyme APOBEC-1 OS = Monodelphis
domestica OX = 13616 GN = APOBEC1 PE = 1 SV = 1
MNSKTGPSVGDATLRRRIKPWEFVAFFNPQELRKETCLLYEIKWGNQNIWRHSNQNTSQH
AEINFMEKFTAERHFNSSVRCSITWFLSWSPCWECSKAIRKFLDHYPNVTLAIFISRLYW
HMDQQHRQGLKELVHSGVTIQIMSYSEYHYCWRNFVDYPQGEEDYWPKYPYLWIMLYVLE
LHCIILGLPPCLKISGSHSNQLALFSLDLQDCHYQKIPYNVLVATGLVQPFVTWR
SEQ ID NO: 59
>tr|A0A1S3FTE2|A0A1S3FTE2_DIPOR C->U-editing enzyme APOBEC-1 OS = Dipodomys
ordii OX = 10020 GN = Apobec1 PE = 4 SV = 1
MHHSARLPPNCIVSRYANAPWTVLPLPLPPTEAPATGDDTLRRRIEPWEFEAFFNPQELR
REACLLYQITWSSHKVWRETAKNTVDSHVEVNFIQNLTAGRYCRPSTRCSILWFLSWSPC
SSCSKAIRLFLSQHPGVSLVIYVARLFQHMDPQNRQGLRELIHSGVTIQVMRPQEYDYCWK
NFVNYPPGQEEHWPRYPVQCMTLYNLELYCIIHNLPPCVRISKQRQSQLAFFSLGLENVHY
QRIPPPLLLLTGLVFVFPWK
SEQ ID NO: 60
>tr|A0A2U3WPA5|AO0A2U3WPA5_ODORO C->U-editing enzyme APOBEC-1
OS = Odobenus rosmarus divergens OX = 9708 GN = APOBEC1 PE = 4 SV = 1
MASDKGPSAGDATLRRRIEPWEFEVFFDPRELRKEACLLYEIQWGTSHKIWRNSGKNTSN
H VEIN FI EKFTSERQYCPSIHCSITWFLSWSPCWECSEAIRGFLSQHPSVTLVIYVARLFWH
MDPQNRQGLRDLINSGVTIQIMRVPEYDHCWRNFVNYPPGKEDHWPRYPVLWMKLYALEL
HCIILSLPPCLRISRRQNQLTLFRLTLQNCHYQMIPPHILLATGLIQVPVTWK
SEQ ID NO: 61
>tr|A0A1V4JAP2|A0A1V4JAP2_PATFA C->U-editing enzyme APOBEC-1 OS = Patagioenas
fasciata monilis OX = 372326 GN = APOBEC1 PE = 4 SV = 1
MRRKKPSGMYISKRALKDNFDPHKFPHDTYLLCKLQWGDTGRSWIHWIRKDRYHAEVYFL
EKIFKMRRSKNYVNCSITWYLSWSPCVRCCCEILNFLEKHSYVNIDIYVARLYKIQNSEVREG
LKKLVSSKKVTIAVMEIKDYTYCWKNFIQGDADDDSWTVDFQSAITKNRLKLKDVFEFLKSH
PNVTLEIYAAKLFKHLDIRNREGLRNLAKNGVIIHIMNLADYSYWWKIFVTRQHGEDDYLPWS
FALHIFLNCIEFQQILLVSRHLKESLRVKSNEKAQEKEVWRIPAMVLAEMIVGKMNRDLMLHE
QRANRARNCKGLWCYIVPL
SEQ ID NO: 62
>tr|A0A2K5JKV4|A0A2K5JKV4_COLAP CMP/dCMP-type deaminase domain-containing
protein OS = Colobus angolensis palliatus OX = 336983 GN = APOBEC1 PE = 4 SV = 1
PSTGDPTLRRRIEPWEFDIFYDPRELRKEACLLYEIKWGMSQKIWRSSGKNTTNHVEVNFIE
KLTSERRFHSSVSCSITWFLSWSPCWECSQAIREFLSQHPGVTLVIYVARLFWHTDQQNRQ
GLRDLVNSGVTIQMMTASEYYHCWRNFVNYPPGEEAHWPRYPPLWMMLYALELHCIILSL
PPCLKISRRWQNHLTFFRLHLQNCHYQTIPPHILLATGLIQPSVTWR
SEQ ID NO: 63
>tr|A0A1U7U8J6|A0A1U7U8J6_TARSY LOW QUALITY PROTEIN: C->U-editing enzyme
APOBEC-1 OS = Tarsius syrichta OX = 1868482 GN = APOBEC1 PE = 4 SV = 2
MLTALMEEVQDTMRFGRRAFFLSNSVGIWVLFDISISXSTGPSMGDPTLRRRIEPWEFEVLF
DPRELRKEACLLYEIKWGTSCKIWRNSGKNTSNHAEVNFLEKFTSERHFCSSTSYSITWFLS
WSPCWECSRAIREFLSQHPRVTLVIYVARLFWHMEPQNRQGLRDLINSGVTIQIMRDSGKS
NKQIIRIVCERTW
SEQ ID NO: 64
>tr|F1SLW4|F1SLW4_PIG CMP/dCMP-type deaminase domain-containing protein OS = Sus
scrota OX = 9823 GN = APOBEC1 PE = 4 SV = 2
MASDRGPSAGDATSRRRIEPWEFEVFFDPRELRKETCLLYELQWGRSRDTWRHTGKNTT
NHVERNFLAKITSERHFHPSVHCSIVWFLSWSPCWECSEAIREFLDQHPSVTLVIYVARLFQ
HMDPQNRQGLRDLVNHGVTIQIMGAPEYDYCWRNFVNYPPGKEAHWPRFPPVWMTLYAL
ELHCIILGLPPCLKISRRCQNQLTFFRLTLQNCHYQTIPPHILLATGLIQLPVIYR
SEQ ID NO: 65
>tr|A0A2K6BGI5|A0A2K6BGI5_MACNE CMP/dCMP-type deaminase domain-containing
protein OS = Macaca nemestrina OX = 9545 GN = APOBEC1 PE = 4 SV = 1
MTSEKGPSTGDPTLRRRIEPWEFDIFYDPRELRKEACLLYEIKWGMSPKIWRSSGKNTTNH
VEVNFIEKLTSERRFHSSISCSITWFLSWSPCWECSQAIREFLSQHPGVTLVIYVARLFWHT
DQQNRQGLRDLVNSGVTIQIMRASEYYHCWRNFVNYLPGEEAHWPRYPPLWMMLYALEL
HCIILSLPPCLKISRRWQNHLTFFRLHLQNCHYQMIPPHILLATGLIQPSVTWR
SEQ ID NO: 66
>sp|P47855|ABEC1_RABIT C->U-editing enzyme APOBEC-1 OS = Oryctolagus cuniculus
OX = 9986 GN = APOBEC1 PE = 1 SV = 1
MASEKGPSNKDYTLRRRIEPWEFEVFFDPQELRKEACLLYEIKWGASSKTWRSSGKNTTN
HVEVNFLEKLTSEGRLGPSTCCSITWFLSWSPCWECSMAIREFLSQHPGVTLIIFVARLFQH
MDRRNRQGLKDLVTSGVTVRVMSVSEYCYCWENFVNYPPGKAAQWPRYPPRWMLMYAL
ELYCIILGLPPCLKISRRHQKQLTFFSLTPQYCHYKMIPPYILLATGLLQPSVPWR
SEQ ID NO: 67
>sp|P38483|ABEC1_RAT C->U-editing enzyme APOBEC-1 OS = Rattus norvegicus
OX = 10116GN = Apobec1 PE = 1 SV = 1
[sequence omitted]
SEQ ID NO: 68
>tr|A0A091M4D7|A0A091M4D7_CARIC C->U-editing enzyme APOBEC-1 (Fragment)
OS = Cariama cristata OX = 54380 GN = N322_12137 PE = 4 SV = 1
RWKIQPDDFKRNYLPGQHPEVVYLLYEIKWNSGTIWRNWCSNNPTQHAEVNFLENHFNVM
SSVSCSITWGISTTPCGKCSRRILEFLTTHPNVTLEIYAAKLFKHLDIRNRQGLRNLAMNGVVI
CIMNLADYSYFWKTFVAY
SEQ ID NO: 69
>tr|A0A093F3R4|A0A093F3R4_GAVST C->U-editing enzyme APOBEC-1 (Fragment)
OS = Gavia stellata OX = 37040 GN = N328_12441 PE = 4 SV = 1
RWKIQPNDFKRNYLPAQHPKVVYLLYEIRWSRGTIWRNWCSNNSTQHAEVNFLENCFKAM
PSVSCSITWFLSTTPCGKCSRRILTFLREHPNVTLEIYAAKLFKHLDVRNQQGLRNLDRNGVI
IRIMNFADYSYCWKRFVAY
SEQ ID NO: 70
>tr|G7N5W0|G7N5W0_MACMU C->U-editing enzyme APOBEC-1 (Fragment) OS = Macaca
mulatta OX = 9544 GN = EGK_03318 PE = 4 SV = 1
GPSTGDPTLRRRIEPWEFDIFYDPRELRKEACLLYEIKWGMSPKIWRSSGKNTTNHVEVNFI
EKLTSERRFHSSISCSITWFLSWSPCWECSQAIREFLSQHPGVTLVIYVARLFWHTDQQNR
QGLRDLVNSGVTIQIMRASEYYHCWRNFVNYPPGEEAHWPRYPPLWMMLYALELHCIILSL
PPCLKISRRWQNHLTFFRLHLQNCHYQMIPPHILLATGLIQPSVTWR
SEQ ID NO: 71
>tr|A0A091MEP8|A0A091MEP8_9PASS C->U-editing enzyme APOBEC-1 (Fragment)
OS = Acanthisitta chloris OX = 57068 GN = N310_12928 PE = 4 SV = 1
RWKIQPNDFQRNYLPDQHPQAVYLLYEFRWRRGSIWRKWCSNNRAQHAEVNFLENCFNG
IPPVPCSITWFLSTTPCGNCSRRILEFLRLHPNVTLEIYAAKLFRHTDIRNRKGLYNLAMNGVII
RIMNLADYSYCWRNFVAY
SEQ ID NO: 72
>tr|A0A2I0LXZ8|A0A2I0LXZ8_COLLI Apolipoprotein B mRNA editing enzyme, catalytic
polypeptide 1 OS = Columba livia OX = 8932 GN = APOBEC1 PE = 4 SV = 1
MAAVTNRDSACRENNQRWKIQPNDFRRNYLPDKQPRVVYLLYEIRWRRGTIWRNWCSNN
PNQHAEVNFLKNYFNAMPSVSCSITWVLSTTPCGKCSIKIMEFLKLHPNVTLEIYAAKLFKHL
DIRNREGLRNLAKNGVIIHIMNLADYSYWWKIFVTRQHGEEDYLPWSFALHIFLNCIEFQQILL
GLPPLLPNFKY
SEQ ID NO: 73
>tr|W5NVH9|W5NVH9_SHEEP CMP/dCMP-type deaminase domain-containing protein
OS = Ovis aries OX = 9940 GN = APOBEC1 PE = 4 SV = 1
MASDRGPPAGDPTLRRRIEPLEFEFSFDPRNFCKEAYLLYEIQWGNSRDVWRHSGKNTTK
HVERNFIEKIASERHFRPSISCSISWYLSWSPCWECSKAIREFLNQHPNVTLVIYIARLFQHM
DPQNRQGLKDLFHSGVTIQVMRDPEYDYCWRNFVNYPQGKEAHWPRYPPLWMNLYALEL
YCIISGLPPCLQISRRHQNQLRVFRLIPQNCHYQMIPPCILLATGMIQLPVTWRWIE
SEQ ID NO: 74
>tr|H0XVG8|H0XVG8_OTOGA CMP/dCMP-type deaminase domain-containing protein
OS = Otolemur garnettii OX = 30611 GN = APOBEC1 PE = 4 SV = 1
ISWSTGISTGDPTLRRRIEPWEFEVFFDPRELRKETCLLYEIKWGTSHKIWRSTARNTTS
HAEMNFIEKFTSERCSDAPISCSITWFLSWSPCWECSKAIREFVSRHPSVTLVIYVARLY
WHMDQQNRQGLRDLISSGVTVQIMRVSEYCHCWRNFVNYLPGKEAHCPRCPPLWMTLYA
LELHCIILSLPPCLKISRGHQNQLTLFRLTLQNCHYQTIPPHVLLATGLIQPYVTWR
SEQ ID NO: 75
>tr|A0A2B4RXQ3|A0A2B4RXQ3_STYPI C->U-editing enzyme APOBEC-1 OS = Stylophora
pistillata OX = 50429 GN = APOBEC1 PE = 4 SV = 1
MASVTELRTPDDFLAELLWTGVTGRTWPNRTFLIVSIKAKDGKPIFGKRFKNRYPEHAEI
IMLRNSNFSDVVEKNHDIDITLTLNYSPCSSCACILKEFYVNNSNIKCFTIQFSFIYYKE
DMKNKTGLQNLEEAGVTLQAMNAESWREVGIDLESFTPEDKEKINKRDKDTANDLNEVLSS
KQDQDASVDELSSQLNAKLRAKET
SEQ ID NO: 76
>tr|A0A2K5L2J6|A0A2K5L2J6_CERAT CMP/dCMP-type deaminase domain-containing
protein OS = Cercocebus atys OX = 9531 GN = APOBEC1 PE = 4 SV = 1
MTPEEEVQRQSTMTSEKGPSTGDPTLRRRIEPWEFDIFYDPRELRKEACLLYEIKWGMSPK
IWRSSGKNTTNHVEVNFIEKLTSERRFHSSISCSITWFLSWSPCWECSQAIREFLSQHPGVT
LVIYVARLFWHTDQQNRQGLRDLVNSGVTIQIMRASEYYHCWRNFVNYPPGEEAHWPRYP
PLWMMLYALELHCIILSLPPCLKISRRQQNHLTFFRLHLQNCHYQTIPPHILLATGLIQPSVTW
R
SEQ ID NO: 77
>tr|A0A2Y9T649|A0A2Y9T649_PHYMC C->U-editing enzyme APOBEC-1 isoform X1
OS = Physeter macrocephalus OX = 9755 GN = APOBEC1 PE = 4 SV = 1
MIICWSTGPSAGDATSRRRIEPWEFEVSFDPREFCKEARLLYEIKWGKSQDVWRHSGKNT
TKHVECNFIEKMTSERHFHPSISCCIIWFLSWSPCWECSKAIREFLNQHPSVTLVIYIARLFQ
HTDPQNRQGLRDLIHSGVTLQIMGPPEYDYCWRNFVNYPPGKEAHWPRYPPLWMKLYAL
ELHCIILGLPPCLKISRRCQNQLTWFRLILQNCHYQMIPPHILLGTGLIQLPVAWR
SEQ ID NO: 78
>tr|H2NGDO|H2NGDO_PONAB Apolipoprotein B mRNA editing enzyme catalytic subunit 1
OS = Pongo abelii OX = 9601 GN = APOBEC1 PE = 4 SV = 1
MTPEEEVQRQSTMTSEKGPSTGDPTLRRRIESWEFDVFYDPRELRKETCLLYEIKWGMSR
KIWRSSGKNTTNHVEVNFIKKFTSERRFHSSISCSITWFLSWSPCWECSQAIREFLSQHPGV
TLVIYVARLFWHMDQRNRQGLRDLVNSGVTIQIMRASEYYHCWRNFVNYPPGDEAHWPQ
YPPLWMMLYALELHCIILSLPPCLKISRRWQNHLAFFRLHLQNCHYQTIPPHILLATGLIHPSV
TWK
SEQ ID NO: 79
>tr|A0A093JI54|A0A093JI54_EURHL C->U-editing enzyme APOBEC-1 (Fragment)
OS = Eurypyga helias OX = 54383 GN = N326_10046 PE = 4 SV = 1
RWKIQPNDFKRNYMPSQYPKVVYLLYEIRWSRGTVWRNWCSNSFTQHAEVNFLENYFKP
MPSVSCSITWVLSTTPCGKCSRRILEFLRVHPNVTLEIYAAKLFKHLDIRNRQGLRDLAMNG
VTIRIMNLADYSFCWKRFVAY
SEQ ID NO: 80
>tr|G3W4H|G3W4H_SARHA Apolipoprotein B mRNA editing enzyme catalytic subunit 1
OS = Sarcophilus harrisii OX = 9305 GN = APOBEC1 PE = 4 SV = 1
MGDATLRRRIKSWEFEAFFNPQELRKETCLLYEIKWGASHNIWRSSNQNTTQHAEINFMEK
FTSERNFKPSVKCSITWFLSWSPCWRCSKAIREFLNQYPNVTLVIFVSRLYWHMEQQHRQ
ELKELVCSGVTIQIMNYSEYRHCWRNFVDYLPEEEDHWPKYPTLWIMLYVLELHCIILGLPP
CLKISVRHSDQLVLFSLDLQDCHYQKIPYHVLVATGIIRPFVTWR
SEQ ID NO: 81
>tr|A0A2U3Y3M5|A0A2U3Y3M5_LEPWE c->U-editing enzyme APOBEC-1
OS = Leptonychotes weddellii OX = 9713 GN = APOBEC1 PE = 4 SV = 1
MASDKGPSAGDATLRRRIKPWEFEVFFDPRELRKETCLLYEIQWGTSHKIWRNSGKNTAN
HVEINFIEKFTSERQYCPSIRCSITWFLSWSPCWECSKAIRGFLSQHPSVTLVIYVARLFWH
MDPQNRQGLRDLINSGVTIQIMRVPEYDHCWRNFVNYLPGKEDHWPRYPVLWMKLYALEL
HCIILPIEMPGKIRDAPNNMEIFSLFVGRYIPKTKFHVTCLLSDVRNDDSHLDKTAPKWIRFDS
LQPVASDPSAEHWKMKLPGRDDKTAVVVGTVTEDVACAQGAKLYLCALRVHGHAQRHFL
KGRDEILALDQLALDSPQGLWRQPDLRSHPLKG
SEQ ID NO: 82
>tr|A0A1S3AN78|A0A1S3AN78_ERIEU C->U-editing enzyme APOBEC-1-like
OS = Erinaceus europaeus OX = 9365 GN = LOC103126721 PE = 4 SV = 1
RRIEPWEFEDFFDPRQFRPETCLLYEVRWGSSRNAWRSTARNTTRHAEVNFLERFAAERH
FDKPVSCSITWFLSWSPCWECSQAIGAFLSQHPQVTLAIHVTRLFHHEDEQNRQGLRDLLA
RGVTLQVMGDSEYAHCWRTFVNSPPGAEGHYPRYPSDFTRLYALELHCIILGLPPCLEILRR
YQNQFTLFRLVPQNCHYQMIPHLNFFVVRHYFF
SEQ ID NO: 83
>tr|A0A091PSV3|A0A091PSV3_HALAL C->U-editing enzyme APOBEC-1 (Fragment)
OS = Haliaeetus albicilla OX = 8969 GN = N329_07103 PE = 4 SV = 1
RWKLQPNDFKRNYLPGQHPKVVYLLYEIRWSRGTIWRNWCSNNSTQHAEVNFLENCFKAT
PSVSCSITWVLSTTPCGKCSRRILEFLRVHPNVTLEIYAAKLFKHLDIRNRKGLRDLAMNGVII
RIMNLSDYSYCWKTFVAY
SEQ ID NO: 84
>tr|F7F6M6|F7F6M6_CALJA Apolipoprotein B mRNA editing enzyme catalytic subunit 1
OS = Callithrix jacchus OX = 9483 GN = APOBEC1 PE = 4 SV = 2
RRIEPWEFYISYDPKELCKETCLLYEIKWGMSWKIWRSSGKNTTNHVEINFIEKFTSERH
FHLSVSCSITWFLSWSPCWECSQAIREFLSQHPGVTLVIYVARLFQHMDQQNRQGLRDLV
NSGVTIQMMTVSEYYHCWRNFVNYPPGEEAHWPRHPPLWLMLYALELHCIILGLPPCLKIS
RRRQNRLTFFRLHLQNCHYQMIPRHILLATGLIQPSVTWR
SEQ ID NO: 85
>tr|L8IDZ0|L8IDZ0_9CETA C->U-editing enzyme APOBEC-1 OS = Bos mutus OX = 72004
GN = M91_02456 PE = 4 SV = 1
MIISWSTGPPAGDPTLRRRIEPWEFEFSFDPRKFCKEACLLYEIQWGNNRDVWRHSGKNTT
KHVERNFIEKIASERYFCPSIRCFIFWYLSWSPCWECSKAIREFLNQHPNVTLVIYIARLFQH
MDPQNRQGLKDLVQSGVTIQVMRAPEYEYCWRNFVNYPRGKEAHWPRYPPLWMNLYAL
ELYCIILGLPPCLHISRRYQNQLIVFRLTLQNCHYQMIPPYILLATGMVQIPMTWR
SEQ ID NO: 86
>tr|A0A093CIQ8|A0A093CIQ8_9AVES C->U-editing enzyme APOBEC-1 (Fragment)
OS = Pterocles gutturalis OX = 240206 GN = N339_03265 PE = 4 SV = 1
RWKIQPNYFKINNLPGQHPRVVCLLYAIRWSRSTLWKSWCSNNSTQHAEVNFLENCFKGN
PSVFCFMTWPFFHTTPHGKCCRRTPEFLGVHPNVTLKIRAAKLFKHLDRYNQQGLRNVAM
NGVVIRIINL
SEQ ID NO: 87
>sp|Q9GZX7|AICDA_HUMAN Single-stranded DNA cytosine deaminase OS = Homo sapiens
OX = 9606 GN = AICDA PE = 1 SV = 1
[sequence omitted]
SEQ ID NO: 88
>sp|Q9Y235|ABEC2_HUMAN C->U-editing enzyme APOBEC-2 OS = Homo sapiens
OX = 9606 GN = APOBEC2 PE = 1 SV = 1
MAQKEEAAVATEAASQNGEDLENLDDPEKLKELIELPPFEIVTGERLPANFFKFQFRNVEYS
SGRNKTFLCYVVEAQGKGGQVQASRGYLEDEHAAAHAEEAFFNTILPAFDPALRYNVTWY
VSSSPCAACADRIIKTLSKTKNLRLLILVGRLFMWEEPEIQAALKKLKEAGCKLRIMKPQDFE
YVWQNFVEQEEGESKAFQPWEDIQENFLYYEEKLADILK
SEQ ID NO: 89
>sp|P31941|ABC3A_HUMAN DNA dC->dll-editing enzyme APOBEC-3A OS = Homo sapiens
OX = 9606 GN = APOBEC3A PE = 1 SV = 3
MEASPASGPRHLMDPHIFTSNFNNGIGRHKTYLCYEVERLDNGTSVKMDQHRGFLHNQAK
NLLCGFYGRHAELRFLDLVPSLQLDPAQIYRVTWFISWSPCFSWGCAGEVRAFLQENTHVR
LRIFAARIYDYDPLYKEALQMLRDAGAQVSIMTYDEFKHCWDTFVDHQGCPFQPWDGLDE
HSQALSGRLRAILQNQGN
SEQ ID NO: 90
>sp|Q9UH17|ABC3B_HUMAN DNA dC->dU-editing enzyme APOBEC-3B OS = Homo
sapiens OX = 9606 GN = APOBEC3B PE = 1 SV = 1
MNPQIRNPMERMYRDTFYDNFENEPILYGRSYTWLCYEVKIKRGRSNLLWDTGVFRGQVY
FKPQYHAEMCFLSWFCGNQLPAYKCFQITWFVSWTPCPDCVAKLAEFLSEHPNVTLTISAA
RLYYYWERDYRRALCRLSQAGARVTIMDYEEFAYCWENFVYNEGQQFMPWYKFDENYAF
LHRTLKEILRYLMDPDTFTFNFNNDPLVLRRRQTYLCYEVERLDNGTWVLMDQHMGFLCNE
AKNLLCGFYGRHAELRFLDLVPSLQLDPAQIYRVTWFISWSPCFSWGCAGEVRAFLQENTH
VRLRIFAARIYDYDPLYKEALQMLRDAGAQVSIMTYDEFEYCWDTFVYRQGCPFQPWDGLE
EHSQALSGRLRAILQNQGN
SEQ ID NO: 91
>sp|Q9NRW3|ABC3C_HUMAN DNA dC->dU-editing enzyme APOBEC-3C OS = Homo
sapiens OX = 9606 GN = APOBEC3C PE = 1 SV = 2
MNPQIRNPMKAMYPGTFYFQFKNLWEANDRNETWLCFTVEGIKRRSVVSWKTGVFRNQV
DSETHCHAERCFLSWFCDDILSPNTKYQVTWYTSWSPCPDCAGEVAEFLARHSNVNLTIFT
ARLYYFQYPCYQEGLRSLSQEGVAVEIMDYEDFKYCWENFVYNDNEPFKPWKGLKTNFRL
LKRRLRESLQ
SEQ ID NO: 92
>sp|Q96AK3|ABC3D_HUMAN DNA dC->dU-editing enzyme APOBEC-3D OS = Homo
sapiens OX = 9606 GN = APOBEC3D PE = 1 SV = 1
MNPQIRNPMERMYRDTFYDNFENEPILYGRSYTWLCYEVKIKRGRSNLLWDTGVFRGPVL
PKRQSNHRQEVYFRFENHAEMCFLSWFCGNRLPANRRFQITWFVSWNPCLPCVVKVTKF
LAEHPNVTLTISAARLYYYRDRDWRWVLLRLHKAGARVKIMDYEDFAYCWENFVCNEGQP
FMPWYKFDDNYASLHRTLKEILRNPMEAMYPHIFYFHFKNLLKACGRNESWLCFTMEVTKH
HSAVFRKRGVFRNQVDPETHCHAERCFLSWFCDDILSPNTNYEVTWYTSWSPCPECAGE
VAEFLARHSNVNLTIFTARLCYFWDTDYQEGLCSLSQEGASVKIMGYKDFVSCWKNFVYSD
DEPFKPWKGLQTNFRLLKRRLREILQ
SEQ ID NO: 93
>sp|Q8IUX4|ABC3F_HUMAN DNA dC->dU-editing enzyme APOBEC-3F OS = Homo sapiens
OX = 9606 GN = APOBEC3F PE = 1 SV = 3
MKPHFRNTVERMYRDTFSYNFYNRPILSRRNTVWLCYEVKTKGPSRPRLDAKIFRGQVYS
QPEHHAEMCFLSWFCGNQLPAYKCFQITWFVSWTPCPDCVAKLAEFLAEHPNVTLTISAAR
LYYYWERDYRRALCRLSQAGARVKIMDDEEFAYCWENFVYSEGQPFMPWYKFDDNYAFL
HRTLKEILRNPMEAMYPHIFYFHFKNLRKAYGRNESWLCFTMEWKHHSPVSWKRGVFRN
QVDPETHCHAERCFLSWFCDDILSPNTNYEVTWYTSWSPCPECAGEVAEFLARHSNVNLTI
FTARLYYFWDTDYQEGLRSLSQEGASVEIMGYKDFKYCWENFVYNDDEPFKPWKGLKYNF
LFLDSKLQEILE
SEQ ID NO: 94
>sp|Q9HC16|ABC3G_HUMAN DNA dC->dU-editing enzyme APOBEC-3G OS = Homo
sapiens OX = 9606 GN = APOBEC3G PE = 1 SV = 1
MKPHFRNTVERMYRDTFSYNFYNRPILSRRNTVWLCYEVKTKGPSRPPLDAKIFRGQVYSE
LKYHPEMRFFHWFSKWRKLHRDQEYEVTWYISWSPCTKCTRDMATFLAEDPKVTLTIFVA
RLYYFWDPDYQEALRSLCQKRDGPRATMKIMNYDEFQHCWSKFVYSQRELFEPWNNLPK
YYILLHIMLGEILRHSMDPPTFTFNFNNEPWVRGRHETYLCYEVERMHNDTWVLLNQRRGF
LCNQAPHKHGFLEGRHAELCFLDVIPFWKLDLDQDYRVTCFTSWSPCFSCAQEMAKFISKN
KHVSLCIFTARIYDDQGRCQEGLRTLAEAGAKISIMTYSEFKHCWDTFVDHQGCPFQPWDG
LDEHSQDLSGRLRAILQNQEN
SEQ ID NO: 95
>sp|Q6NTF7|ABC3H_HUMAN DNA dC->dU-editing enzyme APOBEC-3H OS = Homo
sapiens OX = 9606 GN = APOBEC3H PE = 1 SV = 4
MALLTAETFRLQFNNKRRLRRPYYPRKALLCYQLTPQNGSTPTRGYFENKKKCHAEICFINE
IKSMGLDETQCYQVTCYLTWSPCSSCAWELVDFIKAHDHLNLGIFASRLYYHWCKPQQKGL
RLLCGSQVPVEVMGFPEFADCWENFVDHEKPLSFNPYKMLEELDKNSRAIKRRLERIKIPG
VRAQGRYMDILCDAEV
Petromyzon marinus cytosine deaminase (pmCDA1), Genbank ABO15149.1
SEQ ID NO: 96
MTDAEYVRIHEKLDIYTFKKQFFNNKKSVSHRCYVLFELKRRGERRACFWGYAVNKPQSGT
ERGIHAEIFSIRKVEEYLRDNPGQFTINWYSSWSPCADCAEKILEWYNQELRGNGHTLKIWA
CKLYYEKNARNQIGLWNLRDNGVGLNVMVSEHYQCCRKIFIQSSHNQLNENRWLEKTLKR
AEKRRSELSIMIQVKILHTTKSPAV
Petromyzon marinus cytosine deaminase (pmCDA1) R187W, as used in Target-AID,
SEQ ID NO: 97
MTDAEYVRIHEKLDIYTFKKQFFNNKKSVSHRCYVLFELKRRGERRACFWGYAVNKPQSGT
ERGIHAEIFSIRKVEEYLRDNPGQFTINWYSSWSPCADCAEKILEWYNQELRGNGHTLKIWA
CKLYYEKNARNQIGLWNLRDNGVGLNVMVSEHYQCCRKIFIQSSHNQLNENRWLEKTLKR
AEKWRSELSIMIQVKILHTTKSPAV
E. coli TadA, SEQ ID NO: 98
MSEVEFSHEYWMRHALTLAKRAWDEREVPVGAVLVHNNRVIGEGWNRPIGRHDPTAHAEI
MALRQGGLVMQNYRLIDATLYVTLEPCVMCAGAMIHSRIGRVVFGARDAKTGAAGSLMDVL
HHPGMNHRVEITEGILADECAALLSDFFRMRRQEIKAQKKAQSSTD
S. aureus TadA, SEQ ID NO: 99
MTNDIYFMTLAIEEAKKAAQLGEVPIGAIITKDDEVIARAHNLRETLQQPTAHAEHIAIERAAKV
LGSWRLEGCTLYVTLEPCVMCAGTIVMSRIPRVVYGADDPKGGCSGSLMNLLQQSNFNHR
AIVDKGVLKEACSTLLTTFFKNLRANKKSTN
S. pyogenes TadA, SEQ ID NO: 100
MPYSLEEQTYFMQEALKEAEKSLQKAEIPIGCVIVKDGEIIGRGHNAREESNQAIMHAEMMAI
NEANAHEGNWRLLDTTLFVTIEPCVMCSGAIGLARIPHVIYGASNQKFGGADSLYQILTDER
LNHRVQVERGLLAADCANIMQTFFRQGRERKKIAKHLIKEQSDPFD
S. typhi TadA, SEQ ID NO: 101
MSDVELDHEYWMRHALTLAKRAWDEREVPVGAVLVHNHRVIGEGWNRPIGRHDPTAHAEI
MALRQGGLVLQNYRLLDTTLYVTLEPCVMCAGAMVHSRIGRWFGARDAKTGAAGSLIDVL
HHPGMNHRVEIIEGVLRDECATLLSDFFRMRRQEIKALKKADRAEGAGPAV
A. aeolicus TadA, SEQ ID NO: 102
MGKEYFLKVALREAKRAFEKGEVPVGAIIVKEGEIISKAHNSVEELKDPTAHAEMLAIKEACR
RLNTKYLEGCELYVTLEPCIMCSYALVLSRIEKVIFSALDKKHGGVVSVFNILDEPTLNHRVK
WEYYPLEEASELLSEFFKKLRNNII
S. pombe TAD2, SEQ ID NO: 103
MAGDSVKSAIIGIAGGPFSGKTQLCEQLLERLKSSAPSTFSKLIHLTSFLYPNSVDRYALSSY
DIEAFKKVLSLISQGAEKICLPDGSCIKLPVDQNRIILIEGYYLLLPELLPYYTSKIFVYEDADTR
LERCVLQRVKAEKGDLTKVLNDFVTLSKPAYDSSIHPTRENADIILPQKENIDTALLFVSQHL
QDILAEMNKTSSSNTVKYDTQHETYMKLAHEILNLGPYFVIQPRSPGSCVFVYKGEVIGRGF
NETNCSLSGIRHAELIAIEKILEHYPASVFKETTLYVTVEPCLMCAAALKQLHIKAVYFGCGND
RFGGCGSVFSINKDQSIDPSYPVYPGLFYSEAVMLMREFYVQENVKAPVPQSKKQRVLKR
EVKSLDLSRFK
S. cerevisiae TAD1, SEQ ID NO: 104
MVSCQGTRPCIVNLLTMPSEDKLGEEISTRVINEYSKLKSACRPIIRPSGIREWTILAGVAAIN
RDGGANKIEILSIATGVKALPDSELQRSEGKILHDCHAEILALRGANTVLLNRIQNYNPSSGD
KFIQHNDEIPARFNLKENWELALYISRLPCGDASMSFLNDNCKNDDFIKIEDSDEFQYVDRS
VKTILRGRLNFNRRNVVRTKPGRYDSNITLSKSCSDKLLMKQRSSVLNCLNYELFEKPVFLK
YIVIPNLEDETKHHLEQSFHTRLPNLDNEIKFLNCLKPFYDDKLDEEDVPGLMCSVKLFMDDF
STEEAILNGVRNGFYTKSSKPLRKHCQSQVSRFAQWELFKKIRPEYEGISYLEFKSRQKKRS
QLIIAIKNILSPDGWIPTRTDDVK
S. cerevisiae TAD2, SEQ ID NO: 105
MQHIKHMRTAVRLARYALDHDETPVACIFVHTPTGQVMAYGMNDTNKSLTGVAHAEFMGI
DQIKAMLGSRGVVDVFKDITLYVTVEPCIMCASALKQLDIGKVVFGCGNERFGGNGTVLSVN
HDTCTLVPKNNSAAGYESIPGILRKEAIMLLRYFYVRQNERAPKPRSKSDRVLDKNTFPPME
WSKYLNEEAFIETFGDDYRTCFANKVDLSSNSVDWDLIDSHQDNIIQELEEQCKMFKFNVH
KKSKV
A. thaliana TAD2, SEQ ID NO: 106
MEEDHCEDSHNYMGFALHQAKLALEALEVPVGCVFLEDGKVIASGRNRTNETRNATRHAE
MEAIDQLVGQWQKDGLSPSQVAEKFSKCVLYVTCEPCIMCASALSFLGIKEVYYGCPNDKF
GGCGSILSLHLGSEEAQRGKGYKCRGGIMAEEAVSLFKCFYEQGNPNAPKPHRPVVQRER
T
X. laevis ADAT2, SEQ ID NO: 107
MEPLQITEEIQNWMHKAFQMAQDALNNGEVPVGCLMVYGNQWGKGRNEVNETKNATQH
AEMVAIDQVLDWCEMNSKKSTDVFENIVLYVTVEPCIMCAGALRLLKIPLWYGCRNERFGG
CGSVLNVSGDDIPDTGTKFKCIGGYQAEKAIELLKTFYKQENPNAPKSKVRKKE
X. tropicalis ADAT2, SEQ ID NO: 108
MTEEIQNWMHKAFQMAQDALNNGEVPVGCLMVYDNQVVGKGRNEVNETKNATRHAEMV
AIDQVLDWCEKNSKKSRDVFENIVLYVTVEPCIMCAGALRLLKIPLWYGCRNERFGGCGSV
LNVAGDNIPDTGTEFKYIGGYQAEKAVELLKTFYKQENPNAPRSKVRKKE
D. rerio ADAT2, SEQ ID NO: 109
MQEVGVDPEKNDFLQPSDSEVQTWMAKAFDMAVEALENGEVPVGCLMVYNNEIIGKGRN
EVNETKNATRHAEMVALDQVLDWCRLREKDCKEVCEQTVLYVTVEPCIMCAAALRLLRIPF
VVYGCKNERFGGCGSVLDVSSDHLPHTGTSFKCIAGYRAEEAVEMLKTFYKQENPNAPKP
KVRKDSINPQDGAAVIQVMRGPPDEETETIAHLS
B. Taurus ADAT2, SEQ ID NO: 110
MEAKAGPTAATDGAYSVSAEETEKWMEQAMQMAKDALDNTEVPVGCLMVYNNEVVGKG
RNEVNQTKNATRHAEMVAIDQALDWCRRRGRSPSEVFEHTVLYVTVEPCIMCAAALRLMRI
PLVVYGCQNERFGGCGSVLDIASADLPSTGKPFQCTPGYRAEEAVEMLKTFYKQENPNAP
KSKVRKKECHKS
M. musculus ADAT2, SEQ ID NO: 111
MEEKVESTTTPDGPCVVSVQETEKWMEEAMRMAKEALENIEVPVGCLMVYNNEVVGKGR
NEVNQTKNATRHAEMVAIDQVLDWCHQHGQSPSTVFEHTVLYVTVEPCIMCAAALRLMKIP
LVVYGCQNERFGGCGSVLNIASADLPNTGRPFQCIPGYRAEEAVELLKTFYKQENPNAPKS
KVRKKDCQKS
H. sapiens ADAT2 SEQ ID NO: 112
MEAKAAPKPAASGACSVSAEETEKWMEEAMHMAKEALENTEVPVGCLMVYNNEVVGKGR
NEVNQTKNATRHAEMVAIDQVLDWCRQSGKSPSEVFEHTVLYVTVEPCIMCAAALRLMKIP
LWYGCQNERFGGCGSVLNIASADLPNTGRPFQCIPGYRAEEAVEMLKTFYKQENPNAPKS
KVRKKECQKS
BE1 for Mammalian expression (rAPOBEC1-XTEN-dCas9-NLS)
SEQ ID NO: 113
MSSETGPVAVDPTLRRRIEPHEFEVFFDPRELRKETCLLYEINWGGRHSIWRHTSQNTNKH
VEVNFIEKFTTERYFCPNTRCSITWFLSWSPCGECSRAITEFLSRYPHVTLFIYIARLYHHAD
PRNRQGLRDLISSGVTIQIMTEQESGYCWRNFVNYSPSNEAHWPRYPHLWVRLYVLELYCI
ILGLPPCLNILRRKQPQLTFFTIALQSCHYQRLPPHILWATGLKSGSETPGTSESATPESDKK
YSIGLAIGTNSVGWAVITDEYKVPSKKFKVLGNTDRHSIKKNLIGALLFDSGETAEATRLKRT
ARRRYTRRKNRICYLQEIFSNEMAKVDDSFFHRLEESFLVEEDKKHERHPIFGNIVDEVAYH
EKYPTIYHLRKKLVDSTDKADLRLIYLALAHMIKFRGHFLIEGDLNPDNSDVDKLFIQLVQTYN
QLFEENPINASGVDAKAILSARLSKSRRLENLIAQLPGEKKNGLFGNLIALSLGLTPNFKSNF
DLAEDAKLQLSKDTYDDDLDNLLAQIGDQYADLFLAAKNLSDAILLSDILRVNTEITKAPLSAS
MIKRYDEHHQDLTLLKALVRQQLPEKYKEIFFDQSKNGYAGYIDGGASQEEFYKFIKPILEKM
DGTEELLVKLNREDLLRKQRTFDNGSIPHQIHLGELHAILRRQEDFYPFLKDNREKIEKILTFR
IPYYVGPLARGNSRFAWMTRKSEETITPWNFEEWDKGASAQSFIERMTNFDKNLPNEKVL
PKHSLLYEYFTVYNELTKVKYVTEGMRKPAFLSGEQKKAIVDLLFKTNRKVTVKQLKEDYFK
KIECFDSVEISGVEDRFNASLGTYHDLLKIIKDKDFLDNEENEDILEDIVLTLTLFEDREMIEER
LKTYAHLFDDKVMKQLKRRRYTGWGRLSRKLINGIRDKQSGKTILDFLKSDGFANRNFMQLI
HDDSLTFKEDIQKAQVSGQGDSLHEHIANLAGSPAIKKGILQTVKVVDELVKVMGRHKPENI
VIEMARENQTTQKGQKNSRERMKRIEEGIKELGSQILKEHPVENTQLQNEKLYLYYLQNGR
DMYVDQELDINRLSDYDVDAIVPQSFLKDDSIDNKVLTRSDKNRGKSDNVPSEEVVKKMKN
YWRQLLNAKLITQRKFDNLTKAERGGLSELDKAGFIKRQLVETRQITKHVAQILDSRMNTKY
DENDKLIREVKVITLKSKLVSDFRKDFQFYKVREINNYHHAHDAYLNAVVGTALIKKYPKLES
EFVYGDYKVYDVRKMIAKSEQEIGKATAKYFFYSNIMNFFKTEITLANGEIRKRPLIETNGET
GEIVWDKGRDFATVRKVLSMPQVNIVKKTEVQTGGFSKESILPKRNSDKLIARKKDWDPKK
YGGFDSPTVAYSVLVVAKVEKGKSKKLKSVKELLGITIMERSSFEKNPIDFLEAKGYKEVKKD
LIIKLPKYSLFELENGRKRMLASAGELQKGNELALPSKYVNFLYLASHYEKLKGSPEDNEQK
QLFVEQHKHYLDEIIEQISEFSKRVILADANLDKVLSAYNKHRDKPIREQAENIIHLFTLTNLGA
PAAFKYFDTTIDRKRYTSTKEVLDATLIHQSITGLYETRIDLSQLGGDSGGSPKKKRKV
BE2 (rAPOBEC1-XTEN-dCas9-UGI-NLS) SEQ ID NO: 114
MSSETGPVAVDPTLRRRIEPHEFEVFFDPRELRKETCLLYEINWGGRHSIWRHTSQNTNKH
VEVNFIEKFTTERYFCPNTRCSITWFLSWSPCGECSRAITEFLSRYPHVTLFIYIARLYHHAD
PRNRQGLRDLISSGVTIQIMTEQESGYCWRNFVNYSPSNEAHWPRYPHLWVRLYVLELYCI
ILGLPPCLNILRRKQPQLTFFTIALQSCHYQRLPPHILWATGLKSGSETPGTSESATPESDKK
YSIGLAIGTNSVGWAVITDEYKVPSKKFKVLGNTDRHSIKKNLIGALLFDSGETAEATRLKRT
ARRRYTRRKNRICYLQEIFSNEMAKVDDSFFHRLEESFLVEEDKKHERHPIFGNIVDEVAYH
EKYPTIYHLRKKLVDSTDKADLRLIYLALAHMIKFRGHFLIEGDLNPDNSDVDKLFIQLVQTYN
QLFEENPINASGVDAKAILSARLSKSRRLENLIAQLPGEKKNGLFGNLIALSLGLTPNFKSNF
DLAEDAKLQLSKDTYDDDLDNLLAQIGDQYADLFLAAKNLSDAILLSDILRVNTEITKAPLSAS
MIKRYDEHHQDLTLLKALVRQQLPEKYKEIFFDQSKNGYAGYIDGGASQEEFYKFIKPILEKM
DGTEELLVKLNREDLLRKQRTFDNGSIPHQIHLGELHAILRRQEDFYPFLKDNREKIEKILTFR
IPYYVGPLARGNSRFAWMTRKSEETITPWNFEEWDKGASAQSFIERMTNFDKNLPNEKVL
PKHSLLYEYFTVYNELTKVKYVTEGMRKPAFLSGEQKKAIVDLLFKTNRKVTVKQLKEDYFK
KIECFDSVEISGVEDRFNASLGTYHDLLKIIKDKDFLDNEENEDILEDIVLTLTLFEDREMIEER
LKTYAHLFDDKVMKQLKRRRYTGWGRLSRKLINGIRDKQSGKTILDFLKSDGFANRNFMQLI
HDDSLTFKEDIQKAQVSGQGDSLHEHIANLAGSPAIKKGILQTVKVVDELVKVMGRHKPENI
VIEMARENQTTQKGQKNSRERMKRIEEGIKELGSQILKEHPVENTQLQNEKLYLYYLQNGR
DMYVDQELDINRLSDYDVDAIVPQSFLKDDSIDNKVLTRSDKNRGKSDNVPSEEVVKKMKN
YWRQLLNAKLITQRKFDNLTKAERGGLSELDKAGFIKRQLVETRQITKHVAQILDSRMNTKY
DENDKLIREVKVITLKSKLVSDFRKDFQFYKVREINNYHHAHDAYLNAVVGTALIKKYPKLES
EFVYGDYKVYDVRKMIAKSEQEIGKATAKYFFYSNIMNFFKTEITLANGEIRKRPLIETNGET
GEIVWDKGRDFATVRKVLSMPQVNIVKKTEVQTGGFSKESILPKRNSDKLIARKKDWDPKK
YGGFDSPTVAYSVLVVAKVEKGKSKKLKSVKELLGITIMERSSFEKNPIDFLEAKGYKEVKKD
LIIKLPKYSLFELENGRKRMLASAGELQKGNELALPSKYVNFLYLASHYEKLKGSPEDNEQK
QLFVEQHKHYLDEIIEQISEFSKRVILADANLDKVLSAYNKHRDKPIREQAENIIHLFTLTNLGA
PAAFKYFDTTIDRKRYTSTKEVLDATLIHQSITGLYETRIDLSQLGGDSGGSTNLSDIIEKETG
KQLVIQESILMLPEEVEEVIGNKPESDILVHTAYDESTDENVMLLTSDAPEYKPWALVIQDSN
GENKIKMLSGGSPKKKRKV
BE3 (rAPOBEC1-XTEN-Cas9n-UGI-NLS) SEQ ID NO: 115
MSSETGPVAVDPTLRRRIEPHEFEVFFDPRELRKETCLLYEINWGGRHSIWRHTSQNTNKH
VEVNFIEKFTTERYFCPNTRCSITWFLSWSPCGECSRAITEFLSRYPHVTLFIYIARLYHHAD
PRNRQGLRDLISSGVTIQIMTEQESGYCWRNFVNYSPSNEAHWPRYPHLWVRLYVLELYCI
ILGLPPCLNILRRKQPQLTFFTIALQSCHYQRLPPHILWATGLKSGSETPGTSESATPESDKK
YSIGLAIGTNSVGWAVITDEYKVPSKKFKVLGNTDRHSIKKNLIGALLFDSGETAEATRLKRT
ARRRYTRRKNRICYLQEIFSNEMAKVDDSFFHRLEESFLVEEDKKHERHPIFGNIVDEVAYH
EKYPTIYHLRKKLVDSTDKADLRLIYLALAHMIKFRGHFLIEGDLNPDNSDVDKLFIQLVQTYN
QLFEENPINASGVDAKAILSARLSKSRRLENLIAQLPGEKKNGLFGNLIALSLGLTPNFKSNF
DLAEDAKLQLSKDTYDDDLDNLLAQIGDQYADLFLAAKNLSDAILLSDILRVNTEITKAPLSAS
MIKRYDEHHQDLTLLKALVRQQLPEKYKEIFFDQSKNGYAGYIDGGASQEEFYKFIKPILEKM
DGTEELLVKLNREDLLRKQRTFDNGSIPHQIHLGELHAILRRQEDFYPFLKDNREKIEKILTFR
IPYYVGPLARGNSRFAWMTRKSEETITPWNFEEVVDKGASAQSFIERMTNFDKNLPNEKVL
PKHSLLYEYFTVYNELTKVKYVTEGMRKPAFLSGEQKKAIVDLLFKTNRKVTVKQLKEDYFK
KIECFDSVEISGVEDRFNASLGTYHDLLKIIKDKDFLDNEENEDILEDIVLTLTLFEDREMIEER
LKTYAHLFDDKVMKQLKRRRYTGWGRLSRKLINGIRDKQSGKTILDFLKSDGFANRNFMQLI
HDDSLTFKEDIQKAQVSGQGDSLHEHIANLAGSPAIKKGILQTVKVVDELVKVMGRHKPENI
VIEMARENQTTQKGQKNSRERMKRIEEGIKELGSQILKEHPVENTQLQNEKLYLYYLQNGR
DMYVDQELDINRLSDYDVDHIVPQSFLKDDSIDNKVLTRSDKNRGKSDNVPSEEVVKKMKN
YWRQLLNAKLITQRKFDNLTKAERGGLSELDKAGFIKRQLVETRQITKHVAQILDSRMNTKY
DENDKLIREVKVITLKSKLVSDFRKDFQFYKVREINNYHHAHDAYLNAVVGTALIKKYPKLES
EFVYGDYKVYDVRKMIAKSEQEIGKATAKYFFYSNIMNFFKTEITLANGEIRKRPLIETNGET
GEIVWDKGRDFATVRKVLSMPQVNIVKKTEVQTGGFSKESILPKRNSDKLIARKKDWDPKK
YGGFDSPTVAYSVLVVAKVEKGKSKKLKSVKELLGITIMERSSFEKNPIDFLEAKGYKEVKKD
LIIKLPKYSLFELENGRKRMLASAGELQKGNELALPSKYVNFLYLASHYEKLKGSPEDNEQK
QLFVEQHKHYLDEIIEQISEFSKRVILADANLDKVLSAYNKHRDKPIREQAENIIHLFTLTNLGA
PAAFKYFDTTIDRKRYTSTKEVLDATLIHQSITGLYETRIDLSQLGGDSGGSTNLSDIIEKETG
KQLVIQESILMLPEEVEEVIGNKPESDILVHTAYDESTDENVMLLTSDAPEYKPWALVIQDSN
GENKIKMLSGGSPKKKRKV
CDA1-BE3: SEQ ID NO: 116
MTDAEYVRIHEKLDIYTFKKQFFNNKKSVSHRCYVLFELKRRGERRACFWGYAVNKPQSGT
ERGIHAEIFSIRKVEEYLRDNPGQFTINWYSSWSPCADCAEKILEWYNQELRGNGHTLKIWA
CKLYYEKNARNQIGLWNLRDNGVGLNVMVSEHYQCCRKIFIQSSHNQLNENRWLEKTLKR
AEKRRSELSIMIQVKILHTTKSPAVSGSETPGTSESATPESDKKYSIGLAIGTNSVGWAVITD
EYKVPSKKFKVLGNTDRHSIKKNLIGALLFDSGETAEATRLKRTARRRYTRRKNRICYLQEIF
SNEMAKVDDSFFHRLEESFLVEEDKKHERHPIFGNIVDEVAYHEKYPTIYHLRKKLVDSTDK
ADLRLIYLALAHMIKFRGHFLIEGDLNPDNSDVDKLFIQLVQTYNQLFEENPINASGVDAKAIL
SARLSKSRRLENLIAQLPGEKKNGLFGNLIALSLGLTPNFKSNFDLAEDAKLQLSKDTYDDDL
DNLLAQIGDQYADLFLAAKNLSDAILLSDILRVNTEITKAPLSASMIKRYDEHHQDLTLLKALV
RQQLPEKYKEIFFDQSKNGYAGYIDGGASQEEFYKFIKPILEKMDGTEELLVKLNREDLLRK
QRTFDNGSIPHQIHLGELHAILRRQEDFYPFLKDNREKIEKILTFRIPYYVGPLARGNSRFAW
MTRKSEETITPWNFEEVVDKGASAQSFIERMTNFDKNLPNEKVLPKHSLLYEYFTVYNELTK
VKYVTEGMRKPAFLSGEQKKAIVDLLFKTNRKVTVKQLKEDYFKKIECFDSVEISGVEDRFN
ASLGTYHDLLKIIKDKDFLDNEENEDILEDIVLTLTLFEDREMIEERLKTYAHLFDDKVMKQLK
RRRYTGWGRLSRKLINGIRDKQSGKTILDFLKSDGFANRNFMQLIHDDSLTFKEDIQKAQVS
GQGDSLHEHIANLAGSPAIKKGILQTVKVVDELVKVMGRHKPENIVIEMARENQTTQKGQKN
SRERMKRIEEGIKELGSQILKEHPVENTQLQNEKLYLYYLQNGRDMYVDQELDINRLSDYDV
DHIVPQSFLKDDSIDNKVLTRSDKNRGKSDNVPSEEVVKKMKNYWRQLLNAKLITQRKFDN
LTKAERGGLSELDKAGFIKRQLVETRQITKHVAQILDSRMNTKYDENDKLIREVKVITLKSKLV
SDFRKDFQFYKVREINNYHHAHDAYLNAVVGTALIKKYPKLESEFVYGDYKVYDVRKMIAKS
EQEIGKATAKYFFYSNIMNFFKTEITLANGEIRKRPL
IETNGETGEIVWDKGRDFATVRKVLSMPQVNIVKKTEVQTGGFSKESILPKRNSDKLIARKK
DWDPKKYGGFDSPTVAYSVLVVAKVEKGKSKKLKSVKELLGITIMERSSFEKNPIDFLEAKG
YKEVKKDLIIKLPKYSLFELENGRKRMLASAGELQKGNELALPSKYVNFLYLASHYEKLKGSP
EDNEQKQLFVEQHKHYLDEIIEQISEFSKRVILADANLDKVLSAYNKHRDKPIREQAENIIHLF
TLTNLGAPAAFKYFDTTIDRKRYTSTKEVLDATLIHQSITGLYETRIDLSQLGGDSGGSTNLS
DIIEKETGKQLVIQESILMLPEEVEEVIGNKPESDILVHTAYDESTDENVMLLTSDAPEYKPWA
LVIQDSNGENKIKMLSGGSPKKKRKV
AID-BE3: SEQ ID NO: 117
MDSLLMNRRKFLYQFKNVRWAKGRRETYLCYVVKRRDSATSFSLDFGYLRNKNGCHVELL
FLRYISDWDLDPGRCYRVTWFTSWSPCYDCARHVADFLRGNPNLSLRIFTARLYFCEDRKA
EPEGLRRLHRAGVQIAIMTFKDYFYCWNTFVENHERTFKAWEGLHENSVRLSRQLRRILLP
LYEVDDLRDAFRTLGLSGSETPGTSESATPESDKKYSIGLAIGTNSVGWAVITDEYKVPSKK
FKVLGNTDRHSIKKNLIGALLFDSGETAEATRLKRTARRRYTRRKNRICYLQEIFSNEMAKVD
DSFFHRLEESFLVEEDKKHERHPIFGNIVDEVAYHEKYPTIYHLRKKLVDSTDKADLRLIYLAL
AHMIKFRGHFLIEGDLNPDNSDVDKLFIQLVQTYNQLFEENPINASGVDAKAI
LSARLSKSRRLENLIAQLPGEKKNGLFGNLIALSLGLTPNFKSNFDLAEDAKLQLSKDTYDDD
LDNLLAQIGDQYADLFLAAKNLSDAILLSDILRVNTEITKAPLSASMIKRYDEHHQDLTLLKALV
RQQLPEKYKEIFFDQSKNGYAGYIDGGASQEEFYKFIKPILEKMDGTEELLVKLNREDLLRK
QRTFDNGSIPHQIHLGELHAILRRQEDFYPFLKDNREKIEKILTFRIPYYVGPLARGNSRFAW
MTRKSEETITPWNFEEVVDKGASAQSFIERMTNFDKNLPNEKVLPKHSLLYEYFTVYNELTK
VKYVTEGMRKPAFLSGEQKKAIVDLLFKTNRKVTVKQLKEDYFKKIECFDSVEISGVEDRFN
ASLGTYHDLLKIIKDKDFLDNEENEDILEDIVLTLTLFEDREMIEERLKTYAHLFDDKVMKQLK
RRRYTGWGRLSRKLINGIRDKQSGKTILDFLKSDGFANRNFMQLIHDDSLTFKEDIQKAQVS
GQGDSLHEHIANLAGSPAIKKGILQTVKVVDELVKVMGRHKPENIVIEMARENQTTQKGQKN
SRERMKRIEEGIKELGSQILKEHPVENTQLQNEKLYLYYLQNGRDMYVDQELDINRLSDYDV
DHIVPQSFLKDDSIDNKVLTRSDKNRGKSDNVPSEEVVKKMKNYWRQLLNAKLITQRKFDN
LTKAERGGLSELDKAGFIKRQLVETRQITKHVAQILDSRMNTKYDENDKLIREVKVITLKSKLV
SDFRKDFQFYKVREINNYHHAHDAYLNAVVGTALIKKYPKLESEFVYGDYKVYDVRKMIAKS
EQEIGKATAKYFFYSNIMNFFKTEITLANGEIRKRPLIETNGETGEIVWDKGRDFATVRKVLS
MPQVNIVKKTEVQTGGFSKESILPKRNSDKLIARKKDWDPKKYGGFDSPTVAYSVLVVAKV
EKGKSKKLKSVKELLGITIMERSSFEKNPIDFLEAKGYKEVKKDLIIKLPKYSLFELENGRKRM
LASAGELQKGNELALPSKYVNFLYLASHYEKLKGSPEDNEQKQLFVEQHKHYLDEIIEQISEF
SKRVILADANLDKVLSAYNKHRDKPIREQAENIIHLFTLTNLGAPAAFKYFDTTIDRKRYTSTK
EVLDATLIHQSITGLYETRIDLSQLGGDSGGSTNLSDIIEKETGKQLVIQESILMLPEEVEEVIG
NKPESDILVHTAYDESTDENVMLLTSDAPEYKPWALVIQDSNGENKIKMLSGGSPKKKRKV
BE3-Gam: SEQ ID NO: 118
MAKPAKRIKSAAAAYVPQNRDAVITDIKRIGDLQREASRLETEMNDAIAEITEKFAARIAPIKT
DIETLSKGVQGWCEANRDELTNGGKVKTANLVTGDVSWRVRPPSVSIRGMDAVMETLERL
GLQRFIRTKQEINKEAILLEPKAVAGVAGITVKSGIEDFSIIPFEQEAGISGSETPGTSESATPE
SSSETGPVAVDPTLRRRIEPHEFEVFFDPRELRKETCLLYEINWGGRHSIWRHTSQNTNKH
VEVNFIEKFTTERYFCPNTRCSITWFLSWSPCGECSRAITEFLSRYPHVTLFIYIARLYHHAD
PRNRQGLRDLISSGVTIQIMTEQESGYCWRNFVNYSPSNEAHWPRYPHLWVRLYVLELYCI
ILGLPPCLNILRRKQPQLTFFTIALQSCHYQRLPPHILWATGLKSGSETPGTSESATPESDKK
YSIGLAIGTNSVGWAVITDEYKVPSKKFKVLGNTDRHSIKKNLIGALLFDSGETAEATRLKRT
ARRRYTRRKNRICYLQEIFSNEMAKVDDSFFHRLEESFLVEEDKKHERHPIFGNIVDEVAYH
EKYPTIYHLRKKLVDSTDKADLRLIYLALAHMIKFRGHFLIEGDLNPDNSDVDKLFIQLVQTYN
QLFEENPINASGVDAKAILSARLSKSRRLENLIAQLPGEKKNGLFGNLIALSLGLTPNFKSNF
DLAEDAKLQLSKDTYDDDLDNLLAQIGDQYADLFLAAKNLSDAILLSDILRVNTEITKAPLSAS
MIKRYDEHHQDLTLLKALVRQQLPEKYKEIFFDQSKNGYAGYIDGGASQEEFYKFIKPILEKM
DGTEELLVKLNREDLLRKQRTFDNGSIPHQIHLGELHAILRRQEDFYPFLKDNREKIEKILTFR
IPYYVGPLARGNSRFAWMTRKSEETITPWNFEEVVDKGASAQSFIERMTNFDKNLPNEKVL
PKHSLLYEYFTVYNELTKVKYVTEGMRKPAFLSGEQKKAIVDLLFKTNRKVTVKQLKEDYFK
KIECFDSVEISGVEDRFNASLGTYHDLLKIIKDKDFLDNEENEDILEDIVLTLTLFEDREMIEER
LKTYAHLFDDKVMKQLKRRRYTGWGRLSRKLINGIRDKQSGKTILDFLKSDGFANRNFMQLI
HDDSLTFKEDIQKAQVSGQGDSLHEHIANLAGSPAIKKGILQTVKVVDELVKVMGRHKPENI
VIEMARENQTTQKGQKNSRERMKRIEEGIKELGSQILKEHPVENTQLQNEKLYLYYLQNGR
DMYVDQELDINRLSDYDVDHIVPQSFLKDDSIDNKVLTRSDKNRGKSDNVPSEEVVKKMKN
YWRQLLNAKLITQRKFDNLTKAERGGLSELDKAGFIKRQLVETRQITKHVAQILDSRMNTKY
DENDKLIREVKVITLKSKLVSDFRKDFQFYKVREINNYHHAHDAYLNAVVGTALIKKYPKLES
EFVYGDYKVYDVRKMIAKSEQEIGKATAKYFFYSNIMNFFKTEITLANGEIRKRPLIETNGET
GEIVWDKGRDFATVRKVLSMPQVNIVKKTEVQTGGFSKESILPKRNSDKLIARKKDWDPKK
YGGFDSPTVAYSVLVVAKVEKGKSKKLKSVKELLGITIMERSSFEKNPIDFLEAKGYKEVKKD
LIIKLPKYSLFELENGRKRMLASAGELQKGNELALPSKYVNFLYLASHYEKLKGSPEDNEQK
QLFVEQHKHYLDEIIEQISEFSKRVILADANLDKVLSAYNKHRDKPIREQAENIIHLFTLTNLGA
PAAFKYFDTTIDRKRYTSTKEVLDATLIHQSITGLYETRIDLSQLGGDSGGSTNLSDIIEKETG
KQLVIQESILMLPEEVEEVIGNKPESDILVHTAYDESTDENVMLLTSDAPEYKPWALVIQDSN
GENKIKMLSGGSPKKKRKV
SaBE3-Gam: SEQ ID NO: 119
MAKPAKRIKSAAAAYVPQNRDAVITDIKRIGDLQREASRLETEMNDAIAEITEKFAARIAPIKT
DIETLSKGVQGWCEANRDELTNGGKVKTANLVTGDVSWRVRPPSVSIRGMDAVMETLERL
GLQRFIRTKQEINKEAILLEPKAVAGVAGITVKSGIEDFSIIPFEQEAGISGSETPGTSESATPE
SSSETGPVAVDPTLRRRIEPHEFEVFFDPRELRKETCLLYEINWGGRHSIWRHTSQNTNKH
VEVNFIEKFTTERYFCPNTRCSITWFLSWSPCGECSRAITEFLSRYPHVTLFIYIARLYHHAD
PRNRQGLRDLISSGVTIQIMTEQESGYCWRNFVNYSPSNEAHWPRYPHLWVRLYVLELYCI
ILGLPPCLNILRRKQPQLTFFTIALQSCHYQRLPPHILWATGLKSGSETPGTSESATPESGKR
NYILGLAIGITSVGYGIIDYETRDVIDAGVRLFKEANVENNEGRRSKRGARRLKRRRRHRIQR
VKKLLFDYNLLTDHSELSGINPYEARVKGLSQKLSEEEFSAALLHLAKRRGVHNVNEVEEDT
GNELSTKEQISRNSKALEEKYVAELQLERLKKDGEVRGSINRFKTSDYVKEAKQLLKVQKAY
HQLDQSFIDTYIDLLETRRTYYEGPGEGSPFGWKDIKEWYEMLMGHCTYFPEELRSVKYAY
NADLYNALNDLNNLVITRDENEKLEYYEKFQIIENVFKQKKKPTLKQIAKEILVNEEDIKGYRV
TSTGKPEFTNLKVYHDIKDITARKEIIENAELLDQIAKILTIYQSSEDIQEELTNLNSELTQEEIE
QISNLKGYTGTHNLSLKAINLILDELWHTNDNQIAIFNRLKLVPKKVDLSQQKEIPTTLVDDFIL
SPVVKRSFIQSIKVINAIIKKYGLPNDIIIELAREKNSKDAQKMINEMQKRNRQTNERIEEIIRTT
GKENAKYLIEKIKLHDMQEGKCLYSLEAIPLEDLLNNPFNYEVDHIIPRSVSFDNSFNNKVLVK
QEENSKKGNRTPFQYLSSSDSKISYETFKKHILNLAKGKGRISKTKKEYLLEERDINRFSVQK
DFINRNLVDTRYATRGLMNLLRSYFRVNNLDVKVKSINGGFTSFLRRKWKFKKERNKGYKH
HAEDALHANADFIFKEWKKLDKAKKVMENQMFEEKQAESMPEIETEQEYKEIFITPHQIKHIK
DFKDYKYSHRVDKKPNRELINDTLYSTRKDDKGNTLIVNNLNGLYDKDNDKLKKLINKSPEK
LLMYHHDPQTYQKLKLIMEQYGDEKNPLYKYYEETGNYLTKYSKKDNGPVIKKIKYYGNKLN
AHLDITDDYPNSRNKVVKLSLKPYRFDVYLDNGVYKFVTVKNLDVIKKENYYEVNSKCYEEA
KKLKKISNQAEFIASFYNNDLIKINGELYRVIGVNNDLLNRIEVNMIDITYREYLENMNDKRPP
RIIKTIASKTQSIKKYSTDILGNLYEVKSKKHPQIIKKGGSPKKKRKVSSDYKDHDGDYKDHDI
DYKDDDDKSGGSTNLSDIIEKETGKQLVIQESILMLPEEVEEVIGNKPESDILVHTAYDESTD
ENVMLLT SDAPEYKPWALVIQDSNGENKIKMLSGGSPKKKRKV
BE4: SEQ ID NO: 120
MSSETGPVAVDPTLRRRIEPHEFEVFFDPRELRKETCLLYEINWGGRHSIWRHTSQNTNKH
VEVNFIEKFTTERYFCPNTRCSITWFLSWSPCGECSRAITEFLSRYPHVTLFIYIARLYHHAD
PRNRQGLRDLISSGVTIQIMTEQESGYCWRNFVNYSPSNEAHWPRYPHLWVRLYVLELYCI
ILGLPPCLNILRRKQPQLTFFTIALQSCHYQRLPPHILWATGLKSGGSSGGSSGSETPGTSE
SATPESSGGSSGGSDKKYSIGLAIGTNSVGWAVITDEYKVPSKKFKVLGNTDRHSIKKNLIG
ALLFDSGETAEATRLKRTARRRYTRRKNRICYLQEIFSNEMAKVDDSFFHRLEESFLVEEDK
KHERHPIFGNIVDEVAYHEKYPTIYHLRKKLVDSTDKADLRLIYLALAHMIKFRGHFLIEGDLN
PDNSDVDKLFIQLVQTYNQLFEENPINASGVDAKAILSARLSKSRRLENLIAQLPGEKKNGLF
GNLIALSLGLTPNFKSNFDLAEDAKLQLSKDTYDDDLDNLLAQIGDQYADLFLAAKNLSDAIL
LSDILRVNTEITKAPLSASMIKRYDEHHQDLTLLKALVRQQLPEKYKEIFFDQSKNGYAGYID
GGASQEEFYKFIKPILEKMDGTEELLVKLNREDLLRKQRTFDNGSIPHQIHLGELHAILRRQE
DFYPFLKDNREKIEKILTFRIPYYVGPL
ARGNSRFAWMTRKSEETITPWNFEEVVDKGASAQSFIERMTNFDKNLPNEKVLPKHSLLYE
YFTVYNELTKVKYVTEGMRKPAFLSGEQKKAIVDLLFKTNRKVTVKQLKEDYFKKIECFDSV
EISGVEDRFNASLGTYHDLLKIIKDKDFLDNEENEDILEDIVLTLTLFEDREMIEERLKTYAHLF
DDKVMKQLKRRRYTGWGRLSRKLINGIRDKQSGKTILDFLKSDGFANRNFMQLIHDDSLTF
KEDIQKAQVSGQGDSLHEHIANLAGSPAIKKGILQTVKVVDELVKVMGRHKPENIVIEMARE
NQTTQKGQKNSRERMKRIEEGIKELGSQILKEHPVENTQLQNEKLYLYYLQNGRDMYVDQE
LDINRLSDYDVDHIVPQSFLKDDSIDNKVLTRSDKNRGKSDNVPSEEVVKKMKNYWRQLLN
AKLITQRKFDNLTKAERGGLSELDKAGFIKRQLVETRQITKHVAQILDSRMNTKYDENDKLIR
EVKVITLKSKLVSDFRKDFQFYKVREINNYHHAHDAYLNAVVGTALIKKYPKLESEFVYGDYK
VYDVRKMIAKSEQEIGKATAKYFFYSNIMNFFKTEITLANGEIRKRPLIETNGETGEIVWDKG
RDFATVRKVLSMPQVNIVKKTEVQTGGFSKESILPKRNSDKLIARKKDWDPKKYGGFDSPT
VAYSVLVVAKVEKGKSKKLKSVKELLGITIMERSSFEKNPIDFLEAKGYKEVKKDLIIKLPKYS
LFELENGRKRMLASAGELQKGNELALPSKYVNFLYLASHYEKLKGSPEDNEQKQLFVEQHK
HYLDEIIEQISEFSKRVILADANLDKVLSAYNKHRDKPIREQAENIIHLFTLTNLGAPAAFKYFD
TTIDRKRYTSTKEVLDATLIHQSITGLYETRIDLSQLGGDSGGSGGSGGSTNLSDIIEKETGK
QLVIQESILMLPEEVEEVIGNKPESDILVHTAYDESTDENVMLLTSDAPEYKPWALVIQDSNG
ENKIKMLSGGSGGSGGSTNLSDIIEKETGKQLVIQESILMLPEEVEEVIGNKPESDILVHTAYD
ESTDENVMLLTSDAPEYKPWALVIQDSNGENKIKMLSGGSPKKKRK
BE4-Gam: SEQ ID NO: 121
MAKPAKRIKSAAAAYVPQNRDAVITDIKRIGDLQREASRLETEMNDAIAEITEKFAARIAPIKT
DIETLSKGVQGWCEANRDELTNGGKVKTANLVTGDVSWRVRPPSVSIRGMDAVMETLERL
GLQRFIRTKQEINKEAILLEPKAVAGVAGITVKSGIEDFSIIPFEQEAGISGSETPGTSESATPE
SSSETGPVAVDPTLRRRIEPHEFEVFFDPRELRKETCLLYEINWGGRHSIWRHTSQNTNKH
VEVNFIEKFTTERYFCPNTRCSITWFLSWSPCGECSRAITEFLSRYPHVTLFIYIARLYHHAD
PRNRQGLRDLISSGVTIQIMTEQESGYCWRNFVNYSPSNEAHWPRYPHLWVRLYVLELYCI
ILGLPPCLNILRRKQPQLTFFTIALQSCHYQRLPPHILWATGLKSGGSSGGSSGSETPGTSE
SATPESSGGSSGGSDKKYSIGLAIGTNSVGWAVITDEYKVPSKKFKVLGNTDRHSIKKNLIG
ALLFDSGETAEATRLKRTARRRYTRRKNRICYLQEIFSNEMAKVDDSFFHRLEESFLVEEDK
KHERHPIFGNIVDEVAYHEKYPTIYHLRKKLVDSTDKADLRLIYLALAHMIKFRGHFLIEGDLN
PDNSDVDKLFIQLVQTYNQLFEENPINASGVDAKAILSARLSKSRRLENLIAQLPGEKKNGLF
GNLIALSLGLTPNFKSNFDLAEDAKLQLSKDTYDDDLDNLLAQIGDQYADLFLAAKNLSDAIL
LSDILRVNTEITKAPLSASMIKRYDEHHQDLTLLKALVRQQLPEKYKEIFFDQSKNGYAGYID
GGASQEEFYKFIKPILEKMDGTEELLVKLNREDLLRKQRTFDNGSIPHQIHLGELHAILRRQE
DFYPFLKDNREKIEKILTFRIPYYVGPLARGNSRFAWMTRKSEETITPWNFEEVVDKGASAQ
SFIERMTNFDKNLPNEKVLPKHSLLYEYFTVYNELTKVKYVTEGMRKPAFLSGEQKKAIVDL
LFKTNRKVTVKQLKEDYFKKIECFDSVEISGVEDRFNASLGTYHDLLKIIKDKDFLDNEENEDI
LEDIVLTLTLFEDREMIEERLKTYAHLFDDKVMKQLKRRRYTGWGRLSRKLINGIRDKQSGK
TILDFLKSDGFANRNFMQLIH
DDSLTFKEDIQKAQVSGQGDSLHEHIANLAGSPAIKKGILQTVKVVDELVKVMGRHKPENIVI
EMARENQTTQKGQKNSRERMKRIEEGIKELGSQILKEHPVENTQLQNEKLYLYYLQNGRD
MYVDQELDINRLSDYDVDHIVPQSFLKDDSIDNKVLTRSDKNRGKSDNVPSEEVVKKMKNY
WRQLLNAKLITQRKFDNLTKAERGGLSELDKAGFIKRQLVETRQITKHVAQILDSRMNTKYD
ENDKLIREVKVITLKSKLVSDFRKDFQFYKVREINNYHHAHDAYLNAVVGTALIKKYPKLESE
FVYGDYKVYDVRKMIAKSEQEIGKATAKYFFYSNIMNFFKTEITLANGEIRKRPLIETNGETG
EIVWDKGRDFATVRKVLSMPQVNIVKKTEVQTGGFSKESILPKRNSDKLIARKKDWDPKKY
GGFDSPTVAYSVLVVAKVEKGKSKKLKSVKELLGITIMERSSFEKNPIDFLEAKGYKEVKKDL
HKLPKYSLFELENGRKRMLASAGELQKGNELALPSKYVNFLYLASHYEKLKGSPEDNEQKQ
LFVEQHKHYLDEIIEQISEFSKRVILADANLDKVLSAYNKHRDKPIREQAENIIHLFTLTNLGAP
AAFKYFDTTIDRKRYTSTKEVLDATLIHQSITGLYETRIDLSQLGGDSGGSGGSGGSTNLSDII
EKETGKQLVIQESILMLPEEVEEVIGNKPESDILVHTAYDESTDENVMLLTSDAPEYKPWALV
IQDSNGENKIKMLSGGSGGSGGSTNLSDIIEKETGKQLVIQESILMLPEEVEEVIGNKPESDIL
VHTAYDESTDENVMLLTSDAPEYKPWALVIQDSNGENKIKMLSGGSPKKKRK
SaBE4: SEQ ID NO: 122
MSSETGPVAVDPTLRRRIEPHEFEVFFDPRELRKETCLLYEINWGGRHSIWRHTSQNTNKH
VEVNFIEKFTTERYFCPNTRCSITWFLSWSPCGECSRAITEFLSRYPHVTLFIYIARLYHHAD
PRNRQGLRDLISSGVTIQIMTEQESGYCWRNFVNYSPSNEAHWPRYPHLWVRLYVLELYCI
ILGLPPCLNILRRKQPQLTFFTIALQSCHYQRLPPHILWATGLKSGGSSGGSSGSETPGTSE
SATPESSGGSSGGSGKRNYILGLAIGITSVGYGIIDYETRDVIDAGVRLFKEANVENNEGRRS
KRGARRLKRRRRHRIQRVKKLLFDYNLLTDHSELSGINPYEARVKGLSQKLSEEEFSAALLH
LAKRRGVHNVNEVEEDTGNELSTKEQISRNSKALEEKYVAELQLERLKKDGEVRGSINRFK
TSDYVKEAKQLLKVQKAYHQLDQSFIDTYIDLLETRRTYYEGPGEGSPFGWKDIKEWYEML
MGHCTYFPEELRSVKYAYNADLYNALNDLNNLVITRDENEKLEYYEKFQIIENVFKQKKKPTL
KQIAKEILVNEEDIKGYRVTSTGKPEFTNLKVYHDIKDITARKEIIENAELLDQIAKILTIYQSSE
DIQEELTNLNSELTQEEIEQISNLKGYTGTHNLSLKAINLILDELWHTNDNQIAIFNRLKLVPKK
VDLSQQKEIPTTLVDDFILSPVVKRSFIQSIKVINAIIKKYGLPNDIIIELAREKNSKDAQKMINE
MQKRNRQTNERIEEIIRTTGKENAKYLIEKIKLHDMQEGKCLYSLEAIPLEDLLNNPFNYEVD
HIIPRSVSFDNSFNNKVLVKQEENSKKGNRTPFQYLSSSDSKISYETFKKHILNLAKGKGRIS
KTKKEYLLEERDINRFSVQKDFINRNLVDTRYATRGLMNLLRSYFRVNNLDVKVKSINGGFT
SFLRRKWKFKKERNKGYKHHAEDALIIANADFIFKEWKKLDKAKKVMENQMFEEKQAESMP
EIETEQEYKEIFITPHQIKHIKDFKDYKYSHRVDKKPNRELINDTLYSTRKDDKGNTLIVNNLN
GLYDKDNDKLKKLINKSPEKLLMYHHDPQTYQKLKLIMEQYGDEKNPLYKYYEETGNYLTKY
SKKDNGPVIKKIKYYGNKLNAHLDITDDYPNSRNKVVKLSLKPYRFDVYLDNGVYKFVTVKN
LDVIKKENYYEVNSKCYEEAKKLKKISNQAEFIASFYNNDLIKINGELYRVIGVNNDLLNRIEV
NMIDITYREYLENMNDKRPPRIIKTIASKTQSIKKYSTDILGNLYEVKSKKHPQIIKKGGSPKKK
RKVSSDYKDHDGDYKDHDIDYKDDDDKSGGSGGSGGSTNLSDIIEKETGKQLVIQESILMLP
EEVEEVIGNKPESDILVHTAYDESTDENVMLLTSDAPEYKPWALVIQDSNGEN
KIKMLSGGSGGSGGSTNLSDIIEKETGKQLVIQESILMLPEEVEEVIGNKPESDILVHTAYDES
TDENVMLL TSDAPEYKPWALVIQDSNGENKIKMLSGGSPKKKRKV
SaBE4-Gam: SEQ ID NO: 123
MAKPAKRIKSAAAAYVPQNRDAVITDIKRIGDLQREASRLETEMNDAIAEITEKFAARIAPIKT
DIETLSKGVQGWCEANRDELTNGGKVKTANLVTGDVSWRVRPPSVSIRGMDAVMETLERL
GLQRFIRTKQEINKEAILLEPKAVAGVAGITVKSGIEDFSIIPFEQEAGISGSETPGTSESATPE
SSSETGPVAVDPTLRRRIEPHEFEVFFDPRELRKETCLLYEINWGGRHSIWRHTSQNTNKH
VEVNFIEKFTTERYFCPNTRCSITWFLSWSPCGECSRAITEFLSRYPHVTLFIYIARLYHHAD
PRNRQGLRDLISSGVTIQIMTEQESGYCWRNFVNYSPSNEAHWPRYPHLWVRLYVLELYCI
ILGLPPCLNILRRKQPQLTFFTIALQSCHYQRLPPHILWATGLKSGGSSGGSSGSETPGTSE
SATPESSGGSSGGSGKRNYILGLAIGITSVGYGIIDYETRDVIDAGVRLFKEANVENNEGRRS
KRGARRLKRRRRHRIQRVKKLLFDYNLLTDHSELSGINPYEARVKGLSQKLSEEEFSAALLH
LAKRRGVHNVNEVEEDTGNELSTKEQISRNSKALEEKYVAELQLERLKKDGEVRGSINRFK
TSDYVKEAKQLLKVQKAYHQLDQSFIDTYIDLLETRRTYYEGPGEGSPFGWKDIKEWYEML
MGHCTYFPEELRSVKYAYNADLYNALNDLNNLVITRDENEKLEYYEKFQIIENVFKQKKKPTL
KQIAKEILVNEEDIKGYRVTSTGKPEFTNLKVYHDIKDITARKEIIENAELLDQIAKILTIYQSSE
DIQEELTNLNSELTQEEIEQISNLKGYTGTHNLSLKAINLILDELWHTNDNQIAIFNRLKLVPKK
VDLSQQKEIPTTLVDDFILSPVVKRSFIQSIKVINAIIKKYGLPNDIIIELAREKNSKDAQKMINE
MQKRNRQTNERIEEIIRTTGKENAKYLIEKIKLHDMQEGKCLYSLEAIPLEDLLNNPFNYEVD
HIIPRSVSFDNSFNNKVLVKQEENSKKGNRTPFQYLSSSDSKISYETFKKHILNLAKGKGRIS
KTKKEYLLEERDINRFSVQKDFINRNLVDTRYATRGLMNLLRSYFRVNNLDVKVKSINGGFT
SFLRRKWKFKKERNKGYKHHAEDALIIANADFIFKEWKKLDKAKKVMENQMFEEKQAESMP
EIETEQEYKEIFITPHQIKHIKDFKDYKYSHRVDKKPNRELINDTLYSTRKDDKGNTLIVNNLN
GLYDKDNDKLKKLINKSPEKLLMYHHDPQTYQKLKLIMEQYGDEKNPLYKYYEETGNYLTKY
SKKDNGPVIKKIKYYGNKLNAHLDITDDYPNSRNKVVKLSLKPYRFDVYLDNGVYKFVTVKN
LDVIKKENYYEVNSKCYEEAKKLKKISNQAEFIASFYNNDLIKINGELYRVIGVNNDLLNRIEV
NMIDITYREYLENMNDKRPPRIIKTIASKTQSIKKYSTDILGNLYEVKSKKHPQIIKKGGSPKKK
RKVSSDYKDHDGDYKDHDIDYKDDDDKSGGSGGSGGSTNLSDIIEKETGKQLVIQESILMLP
EEVEEVIGNKPESDILVHTAYDESTDENVMLLTSDAPEYKPWALVIQDSNGENKIKMLSGGS
GGSGGSTNLSDIIEKETGKQLVIQESILMLPEEVEEVIGNKPESDILVHTAYDESTDENVMLLT
SDAPEYKPWALVIQDSNGENKIKMLSGGSPKKKRKV
BE4max and AncBE4max, SEQ ID NO: 124
MKRTADGSEFESPKKKRKV[APOBEC or ancestral APOBEC, sequences see
below]SGGSSGGSSGSETPGTSESATPESSGGSSGGSDKKYSIGLAIGTNSVGWAVITDEY
KVPSKKFKVLGNTDRHSIKKNLIGALLFDSGETAEATRLKRTARRRYTRRKNRICYLQEIFSN
EMAKVDDSFFHRLEESFLVEEDKKHERHPIFGNIVDEVAYHEKYPTIYHLRKKLVDSTDKAD
LRLIYLALAHMIKFRGHFLIEGDLNPDNSDVDKLFIQLVQTYNQLFEENPINASGVDAKAILSA
RLSKSRRLENLIAQLPGEKKNGLFGNLIALSLGLTPNFKSNFDLAEDAKLQLSKDTYDDDLD
NLLAQIGDQYADLFLAAKNLSDAILLSDILRVNTEITKAPLSASMIKRYDEHHQDLTLLKALVR
QQLPEKYKEIFFDQSKNGYAGYIDGGASQEEFYKFIKPILEKMDGTEELLVKLNREDLLRKQ
RTFDNGSIPHQIHLGELHAILRRQEDFYPFLKDNREKIEKILTFRIPYYVGPLARGNSRFAWM
TRKSEETITPWNFEEVVDKGASAQSFIERMTNFDKNLPNEKVLPKHSLLYEYFTVYNELTKV
KYVTEGMRKPAFLSGEQKKAIVDLLFKTNRKVTVKQLKEDYFKKIECFDSVEISGVEDRFNA
SLGTYHDLLKIIKDKDFLDNEENEDILEDIVLTLTLFEDREMIEERLKTYAHLFDDKVMKQLKR
RRYTGWGRLSRKLINGIRDKQSGKTILDFLKSDGFANRNFMQLIHDDSLTFKEDIQKAQVSG
QGDSLHEHIANLAGSPAIKKGILQTVKVVDELVKVMGRHKPENIVIEMARENQTTQKGQKNS
RERMKRIEEGIKELGSQILKEHPVENTQLQNEKLYLYYLQNGRDMYVDQELDINRLSDYDVD
HIVPQSFLKDDSIDNKVLTRSDKNRGKSDNVPSEEVVKKMKNYWRQLLNAKLITQRKFDNL
TKAERGGLSELDKAGFIKRQLVETRQITKHVAQILDSRMNTKYDENDKLIREVKVITLKSKLV
SDFRKDFQFYKVREINNYHHAHDAYLNAWGTALIKKYPKLESEFVYGDYKVYDVRKMIAKS
EQEIGKATAKYFFYSNIMNFFKTEITLANGEIRKRPLIETNGETGEIVWDKGRDFATVRKVLS
MPQVNIVKKTEVQTGGFSKESILPKRNSDKLIARKKDWDPKKYGGFDSPTVAYSVLVVAKV
EKGKSKKLKSVKELLGITIMERSSFEKNPIDFLEAKGYKEVKKDLIIKLPKYSLFELENGRKRM
LASAGELQKGNELALPSKYVNFLYLASHYEKLKGSPEDNEQKQLFVEQHKHYLDEIIEQISEF
SKRVILADANLDKVLSAYNKHRDKPIREQAENIIHLFTLTNLGAPAAFKYFDTTIDRKRYTSTK
EVLDATLIHQSITGLYETRIDLSQLGGDSGGSGGSGGSTNLSDIIEKETGKQLVIQESILMLPE
EVEEVIGNKPESDILVHTAYDESTDENVMLLTSDAPEYKPWALVIQDSNGENKIKML_SGGS
GGSGGS_TNLSDIIEKETGKQLVIQESILMLPEEVEEVIGNKPESDILVHTAYDESTDENVMLL
TSDAPEYKPWALVIQDSNGENKIKMLSGGSKRTADGSEFEPKKKRKV
Rat APOBEC1, SEQ ID NO: 125
SSETGPVAVDPTLRRRIEPHEFEVFFDPRELRKETCLLYEINWGGRHSIWRHTSQNTNKHV
EVNFIEKFTTERYFCPNTRCSITWFLSWSPCGECSRAITEFLSRYPHVTLFIYIARLYHHADP
RNRQGLRDLISSGVTIQIMTEQESGYCWRNFVNYSPSNEAHWPRYPHLWVRLYVLELYCIIL
GLPPCLNILRRKQPQLTFFTIALQSCHYQRLPPHILWATGLK
Anc689 APOBEC, SEQ ID NO: 126
SSETGPVAVDPTLRRRIEPHEFEVFFDPRELRKETCLLYEIKWGTSHKIWRHSSKNTTKHVE
VNFIEKFTSERHFCPSTSCSITWFLSWSPCGECSKAITEFLSQHPNVTLVIYVARLYHHMDQ
QNRQGLRDLVNSGVTIQIMTAPEYDYCWRNFVNYPPGKEAHWPRYPPLWMKLYALELHA
GILGLPPCLNILRRKQPQLTFFTIALQSCHYQRLPPHILWAT GLK
Anc687 APOBEC, SEQ ID NO: 127
SSETGPVAVDPTLRRRIEPHEFEVFFDPRELRKEACLLYEIKWGTSHKIWRNSGKNTTKHVE
VNFIEKFTSERHFCPSISCSITWFLSWSPCWECSKAIREFLSQHPNVTLVIYVARLFQHMDQ
QNRQGLRDLVNSGVTIQIMTASEYDHCWRNFVNYPPGKEAHWPRYPPLWMKLYALELHA
GILGLPPCLNILRRKQPQLTFFTIALQSCHYQRLPPHILWATGLK
Anc686 APOBEC, SEQ ID NO: 128
SSETGPVAVDPTLRRRIEPEFFNRNYDPRELRKETYLLYEIKWGKESKIWRHTSNNRTQHA
EVNFLENFFNELYFNPSTHCSITWFLSWSPCGECSKAIVEFLKEHPNVNLEIYVARLYLCED
ERNRQGLRDLVNSGVTIRIMNLPDYNYCWRTFVSHQGGDEDYWPRHFAPWVRLYVLELY
CIILGLPPCLNILRRKQPQLTFFTIALQSCHYQRLPPHILWAT GLK
Anc655 APOBEC, SEQ ID NO: 129
SSETGPVAVDPTLRRRIEPFYFQFNNDPRACRRKTYLCYELKQDGSTWVWKRTLHNKGRH
AEICFLEKISSLEKLDPAQHYRITWYMSWSPCSNCAQKIVDFLKEHPHVNLRIYVARLYYHEE
ERYQEGLRNLRRSGVSIRVMDLPDFEHCWETFVDNGGGPFQPWPGLEELNSKQLSRRLQ
AGILGLPPCLNILRRKQPQLTFFTIALQSCHYQRLPPHIL WATGLK
Anc733 APOBEC, SEQ ID NO: 130
SSETGPVAVDPTLRRRIEPFHFQFNNDPRAYRRKTYLCYELKQDGSTWVLDRTLRNKGRH
AEICFLDKINSWERLDPAQHYRVTWYMSWSPCSNCAQQVVDFLKEHPHVNLRIFAARLYYH
EQRRYQEGLRSLRGSGVPVAVMTLPDFEHCWETFVDHGGRPFQPWDGLEELNSRSLSRR
LQAGILGLPPCLNILRRKQPQLTFFTIALQSCHYQRLPPHI LWATGLK
APOBEC ancestor #686, SEQ ID NO: 131
EFFNRNYDPRELRKETYLLYEIKWGKESKIWRHWCTSNNRTQHAEVNFLENFFNELYFNPS
THCSITWFLSWSPCGECSKAIVEFLKEHPNVNLEIYVARLYLCEDERNRQGLRDLVNSGVTI
RIMNLPDYNYCWRTFVSHQGGDEDYWPRHFAPWVRL
APOBEC ancestor #733, SEQ ID NO: 132
FHFQFNNDPRAYRRKTYLCYELKQDGSTWVLDRGCTLRNKGRHAEICFLDKINSWERLDP
AQHYRVTWYMSWSPCSNCAQQVVDFLKEHPHVNLRIFAARLYYHEQRRYQEGLRSLRGS
GVPVAVMTLPDFEHCWETFVDHGGRPFQPWDGLEELNSRSLSRRLQAG
APOBEC ancestor #656_FERNY, SEQ ID NO: 133
FERNYDPRELRKETYLLYEIKWGKSGKLWRHWCQNNRTQHAEVYFLENIFNARRFNPSTH
CSITWYLSWSPCAECSQKIVDFLKEHPNVNLEIYVARLYYHEDERNRQGLRDLVNSGVTIRI
MDLPDYNYCWKTFVSDQGGDEDYWPGHFAPWIKQYSLKL
APOBEC ancestor #655, SEQ ID NO: 134
FYFQFNNDPRACRRKTYLCYELKQDGSTWVWKRGCTLHNKGRHAEICFLEKISSLEKLDPA
QHYRITWYMSWSPCSNCAQKIVDFLKEHPHVNLRIYVARLYYHEEERYQEGLRNLRRSGV
SIRVMDLPDFEHCWETFVDNGGGPFQPWPGLEENSKQLSRRLQAG
APOBEC ancestor #649, SEQ ID NO: 135
FYEEFNNTLKSCRHKTLLCFSLKQDENTTLWKWGYAHNNGRHAEILVLREIENYEKLDPAA
KYRITLYMSYSPCNDCADKIVDFLKKHPNVNLNIKVSRLYYHEDEKYQEGLRNLKQPGVSLK
VMDRSDFEECFDLFVDPGGGEFQPWPGLEEKSKQYSATLQAG
ABE6.3, SED ID: 136
MSEVEFSHEYWMRHALTLAKRAWDEREVPVGAVLVHNNRVIGEGWNRPIGRHDPTAHAEI
MALRQGGLVMQNYRLIDATYVTLEPCVMCAGAMIHSRIGRVVFGARDAKTGAAGSLMDVL
HHPGMNHRVEITEGILADECAALLSDFFRMRRQEIKAQKKAQSSTDSGGSSGGSSGSETP
GTSESATPESSGGSSGGSSEVEFSHEYWMRHALTLAKRAWDEREVPVGAVLVLNNRVIGE
GWNRSIGLHDPTAHAEIMALRQGGLVMQNYRLIDATLYVTFEPCVMCAGAMIHSRIGRVVF
GVRNAKTGAAGSLMDVLHYPGMNHRVEITEGILADECAALLCYFFRMRRQVFNAQKKAQS
STDSGGSSGGSSGSETPGTSESATPESSGGSSGGSDKKYSIGLAIGTNSVGWAVITDEYKV
PSKKFKVLGNTDRHSIKKNLIGALLFDSGETAEATRLKRTARRRYTRRKNRICYLQEIFSNEM
AKVDDSFFHRLEESFLVEEDKKHERHPIFGNIVDEVAYHEKYPTIYHLRKKLVDSTDKADLRL
IYLALAHMIKFRGHFLIEGDLNPDNSDVDKLFIQLVQTYNQLFEENPINASGVDAKAILSARLS
KSRRLENLIAQLPGEKKNGLFGNLIALSLGLTPNFKSNFDLAEDAKLQLSKDTYDDDLDNLLA
QIGDQYADLFLAAKNLSDAILLSDILRVNTEITKAPLSASMIKRYDEHHQDLTLLKALVRQQLP
EKYKEIFFDQSKNGYAGYIDGGASQEEFYKFIKPILEKMDGTEELLVKLNREDLLRKQRTFD
NGSIPHQIHLGELHAILRRQEDFYPFLKDNREKIEKILTFRIPYYVGPLARGNSRFAWMTRKS
EETITPWNFEEVVDKGASAQSFIERMTNFDKNLPNEKVLPKHSLLYEYFTVYNELTKVKYVT
EGMRKPAFLSGEQKKAIVDLLFKTNRKVTVKQLKEDYFKKIECFDSVEISGVEDRFNASLGT
YHDLLKIIKDKDFLDNEENEDILEDIVLTLTLFEDREMIEERLKTYAHLFDDKVMKQLKRRRYT
GWGRLSRKLINGIRDKQSGKTILDFLKSDGFANRNFMQLIHDDSLTFKEDIQKAQVSGQGDS
LHEHIANLAGSPAIKKGILQTVKVVDELVKVMGRHKPENIVIEMARENQTTQKGQKNSRERM
KRIEEGIKELGSQILKEHPVENTQLQNEKLYLYYLQNGRDMYVDQELDINRLSDYDVDHIVP
QSFLKDDSIDNKVLTRSDKNRGKSDNVPSEEVVKKMKNYWRQLLNAKLITQRKFDNLTKAE
RGGLSELDKAGFIKRQLVETRQITKHVAQILDSRMNTKYDENDKLIREVKVITLKSKLVSDFR
KDFQFYKVREINNYHHAHDAYLNAVVGTALIKKYPKLESEFVYGDYKVYDVRKMIAKSEQEI
GKATAKYFFYSNIMNFFKTEITLANGEIRKRPLIETNGETGEIVWDKGRDFATVRKVLSMPQV
NIVKKTEVQTGGFSKESILPKRNSDKLIARKKDWDPKKYGGFDSPTVAYSVLVVAKVEKGKS
KKLKSVKELLGITIMERSSFEKNPIDFLEAKGYKEVKKDLIIKLPKYSLFELENGRKRMLASAG
ELQKGNELALPSKYVNFLYLASHYEKLKGSPEDNEQKQLFVEQHKHYLDEIIEQISEFSKRVI
LADANLDKVLSAYNKHRDKPIREQAENIIHLFTLTNLGAPAAFKYFDTTIDRKRYTSTKEVLDA
TLIHQSITGLYETRIDLSQLGGDSGGSPKKKRKV
ABE7.8, SED ID: 137
MSEVEFSHEYWMRHALTLAKRAWDEREVPVGAVLVHNNRVIGEGWNRPIGRHDPTAHAEI
MALRQGGLVMQNYRLIDATLYVTLEPCVMCAGAMIHSRIGRVVFGARDAKTGAAGSLMDVL
HHPGMNHRVEITEGILADECAALLSDFFRMRRQEIKAQKKAQSSTDSGGSSGGSSGSETP
GTSESATPESSGGSSGGSSEVEFSHEYWMRHALTLAKRALDEREVPVGAVLVLNNRVIGE
GWNRAIGLHDPTAHAEIMALRQGGLVMQNYRLIDATLYVTFEPCVMCAGAMIHSRIGRVVF
GVRNAKTGAAGSLMDVLHYPGMNHRVEITEGILADECNALLCYFFRMRRQVFNAQKKAQS
STDSGGSSGGSSGSETPGTSESATPESSGGSSGGSDKKYSIGLAIGTNSVGWAVITDEYKV
PSKKFKVLGNTDRHSIKKNLIGALLFDSGETAEATRLKRTARRRYTRRKNRICYLQEIFSNEM
AKVDDSFFHRLEESFLVEEDKKHERHPIFGNIVDEVAYHEKYPTIYHLRKKLVDSTDKADLRL
IYLALAHMIKFRGHFLIEGDLNPDNSDVDKLFIQLVQTYNQLFEENPINASGVDAKAILSARLS
KSRRLENLIAQLPGEKKNGLFGNLIALSLGLTPNFKSNFDLAEDAKLQLSKDTYDDDLDNLLA
QIGDQYADLFLAAKNLSDAILLSDILRVNTEITKAPLSASMIKRYDEHHQDLTLLKALVRQQLP
EKYKEIFFDQSKNGYAGYIDGGASQEEFYKFIKPILEKMDGTEELLVKLNREDLLRKQRTFD
NGSIPHQIHLGELHAILRRQEDFYPFLKDNREKIEKILTFRIPYYVGPLARGNSRFAWMTRKS
EETITPWNFEEVVDKGASAQSFIERMTNFDKNLPNEKVLPKHSLLYEYFTVYNELTKVKYVT
EGMRKPAFLSGEQKKAIVDLLFKTNRKVTVKQLKEDYFKKIECFDSVEISGVEDRFNASLGT
YHDLLKIIKDKDFLDNEENEDILEDIVLTLTLFEDREMIEERLKTYAHLFDDKVMKQLKRRRYT
GWGRLSRKLINGIRDKQSGKTILDFLKSDGFANRNFMQLIHDDSLTFKEDIQKAQVSGQGDS
LHEHIANLAGSPAIKKGILQTVKVVDELVKVMGRHKPENIVIEMARENQTTQKGQKNSRERM
KRIEEGIKELGSQILKEHPVENTQLQNEKLYLYYLQNGRDMYVDQELDINRLSDYDVDHIVP
QSFLKDDSIDNKVLTRSDKNRGKSDNVPSEEVVKKMKNYWRQLLNAKLITQRKFDNLTKAE
RGGLSELDKAGFIKRQLVETRQITKHVAQILDSRMNTKYDENDKLIREVKVITLKSKLVSDFR
KDFQFYKVREINNYHHAHDAYLNAVVGTALIKKYPKLESEFVYGDYKVYDVRKMIAKSEQEI
GKATAKYFFYSNIMNFFKTEITLANGEIRKRPLIETNGETGEIVWDKGRDFATVRKVLSMPQV
NIVKKTEVQTGGFSKESILPKRNSDKLIARKKDWDPKKYGGFDSPTVAYSVLVVAKVEKGKS
KKLKSVKELLGITIMERSSFEKNPIDFLEAKGYKEVKKDLIIKLPKYSLFELENGRKRMLASAG
ELQKGNELALPSKYVNFLYLASHYEKLKGSPEDNEQKQLFVEQHKHYLDEIIEQISEFSKRVI
LADANLDKVLSAYNKHRDKPIREQAENIIHLFTLTNLGAPAAFKYFDTTIDRKRYTSTKEVLDA
TLIHQSITGLYETRIDLSQLGGDSGGSPKKKRKV
ABE7.9, SED ID: 138
MSEVEFSHEYWMRHALTLAKRAWDEREVPVGAVLVHNNRVIGEGWNRPIGRHDPTAHAEI
MALRQGGLVMQNYRLIDATLYVTLEPCVMCAGAMIHSRIGRVVFGARDAKTGAAGSLMDVL
HHPGMNHRVEITEGILADECAALLSDFFRMRRQEIKAQKKAQSSTDSGGSSGGSSGSETP
GTSESATPESSGGSSGGSSEVEFSHEYWMRHALTLAKRALDEREVPVGAVLVLNNRVIGE
GWNRAIGLHDPTAHAEIMALRQGGLVMQNYRLIDATLYVTFEPCVMCAGAMIHSRIGRVVF
GVRNAKTGAAGSLMDVLHYPGMNHRVEITEGILADECNALLCYFFRMPRQVFNAQKKAQS
STDSGGSSGGSSGSETPGTSESATPESSGGSSGGSDKKYSIGLAIGTNSVGWAVITDEYKV
PSKKFKVLGNTDRHSIKKNLIGALLFDSGETAEATRLKRTARRRYTRRKNRICYLQEIFSNEM
AKVDDSFFHRLEESFLVEEDKKHERHPIFGNIVDEVAYHEKYPTIYHLRKKLVDSTDKADLRL
IYLALAHMIKFRGHFLIEGDLNPDNSDVDKLFIQLVQTYNQLFEENPINASGVDAKAILSARLS
KSRRLENLIAQLPGEKKNGLFGNLIALSLGLTPNFKSNFDLAEDAKLQLSKDTYDDDLDNLLA
QIGDQYADLFLAAKNLSDAILLSDILRVNTEITKAPLSASMIKRYDEHHQDLTLLKALVRQQLP
EKYKEIFFDQSKNGYAGYIDGGASQEEFYKFIKPILEKMDGTEELLVKLNREDLLRKQRTFD
NGSIPHQIHLGELHAILRRQEDFYPFLKDNREKIEKILTFRIPYYVGPLARGNSRFAWMTRKS
EETITPWNFEEVVDKGASAQSFIERMTNFDKNLPNEKVLPKHSLLYEYFTVYNELTKVKYVT
EGMRKPAFLSGEQKKAIVDLLFKTNRKVTVKQLKEDYFKKIECFDSVEISGVEDRFNASLGT
YHDLLKIIKDKDFLDNEENEDILEDIVLTLTLFEDREMIEERLKTYAHLFDDKVMKQLKRRRYT
GWGRLSRKLINGIRDKQSGKTILDFLKSDGFANRNFMQLIHDDSLTFKEDIQKAQVSGQGDS
LHEHIANLAGSPAIKKGILQTVKVVDELVKVMGRHKPENIVIEMARENQTTQKGQKNSRERM
KRIEEGIKELGSQILKEHPVENTQLQNEKLYLYYLQNGRDMYVDQELDINRLSDYDVDHIVP
QSFLKDDSIDNKVLTRSDKNRGKSDNVPSEEVVKKMKNYWRQLLNAKLITQRKFDNLTKAE
RGGLSELDKAGFIKRQLVETRQITKHVAQILDSRMNTKYDENDKLIREVKVITLKSKLVSDFR
KDFQFYKVREINNYHHAHDAYLNAWGTALIKKYPKLESEFVYGDYKVYDVRKMIAKSEQEI
GKATAKYFFYSNIMNFFKTEITLANGEIRKRPLIETNGETGEIVWDKGRDFATVRKVLSMPQV
NIVKKTEVQTGGFSKESILPKRNSDKLIARKKDWDPKKYGGFDSPTVAYSVLVVAKVEKGKS
KKLKSVKELLGITIMERSSFEKNPIDFLEAKGYKEVKKDLIIKLPKYSLFELENGRKRMLASAG
ELQKGNELALPSKYVNFLYLASHYEKLKGSPEDNEQKQLFVEQHKHYLDEIIEQISEFSKRVI
LADANLDKVLSAYNKHRDKPIREQAENIIHLFTLTNLGAPAAFKYFDTTIDRKRYTSTKEVLDA
TLIHQSITGLYETRIDLSQLGGDSGGSPKKKRKV
ABE7.10, SED ID: 139
MSEVEFSHEYWMRHALTLAKRAWDEREVPVGAVLVHNNRVIGEGWNRPIGRHDPTAHAEI
MALRQGGLVMQNYRLIDATLYVTLEPCVMCAGAMIHSRIGRVVFGARDAKTGAAGSLMDVL
HHPGMNHRVEITEGILADECAALLSDFFRMRRQEIKAQKKAQSSTDSGGSSGGSSGSETP
GTSESATPESSGGSSGGSSEVEFSHEYWMRHALTLAKRARDEREVPVGAVLVLNNRVIGE
GWNRAIGLHDPTAHAEIMALRQGGLVMQNYRLIDATLYVTFEPCVMCAGAMIHSRIGRVVF
GVRNAKTGAAGSLMDVLHYPGMNHRVEITEGILADECAALLCYFFRMPRQVFNAQKKAQS
STDSGGSSGGSSGSETPGTSESATPESSGGSSGGSDKKYSIGLAIGTNSVGWAVITDEYKV
PSKKFKVLGNTDRHSIKKNLIGALLFDSGETAEATRLKRTARRRYTRRKNRICYLQEIFSNEM
AKVDDSFFHRLEESFLVEEDKKHERHPIFGNIVDEVAYHEKYPTIYHLRKKLVDSTDKADLRL
IYLALAHMIKFRGHFLIEGDLNPDNSDVDKLFIQLVQTYNQLFEENPINASGVDAKAILSARLS
KSRRLENLIAQLPGEKKNGLFGNLIALSLGLTPNFKSNFDLAEDAKLQLSKDTYDDDLDNLLA
QIGDQYADLFLAAKNLSDAILLSDILRVNTEITKAPLSASMIKRYDEHHQDLTLLKALVRQQLP
EKYKEIFFDQSKNGYAGYIDGGASQEEFYKFIKPILEKMDGTEELLVKLNREDLLRKQRTFD
NGSIPHQIHLGELHAILRRQEDFYPFLKDNREKIEKILTFRIPYYVGPLARGNSRFAWMTRKS
EETITPWNFEEVVDKGASAQSFIERMTNFDKNLPNEKVLPKHSLLYEYFTVYNELTKVKYVT
EGMRKPAFLSGEQKKAIVDLLFKTNRKVTVKQLKEDYFKKIECFDSVEISGVEDRFNASLGT
YHDLLKIIKDKDFLDNEENEDILEDIVLTLTLFEDREMIEERLKTYAHLFDDKVMKQLKRRRYT
GWGRLSRKLINGIRDKQSGKTILDFLKSDGFANRNFMQLIHDDSLTFKEDIQKAQVSGQGDS
LHEHIANLAGSPAIKKGILQTVKVVDELVKVMGRHKPENIVIEMARENQTTQKGQKNSRERM
KRIEEGIKELGSQILKEHPVENTQLQNEKLYLYYLQNGRDMYVDQELDINRLSDYDVDHIVP
QSFLKDDSIDNKVLTRSDKNRGKSDNVPSEEVVKKMKNYWRQLLNAKLITQRKFDNLTKAE
RGGLSELDKAGFIKRQLVETRQITKHVAQILDSRMNTKYDENDKLIREVKVITLKSKLVSDFR
KDFQFYKVREINNYHHAHDAYLNAVVGTALIKKYPKLESEFVYGDYKVYDVRKMIAKSEQEI
GKATAKYFFYSNIMNFFKTEITLANGEIRKRPLIETNGETGEIVWDKGRDFATVRKVLSMPQV
NIVKKTEVQTGGFSKESILPKRNSDKLIARKKDWDPKKYGGFDSPTVAYSVLVVAKVEKGKS
KKLKSVKELLGITIMERSSFEKNPIDFLEAKGYKEVKKDLIIKLPKYSLFELENGRKRMLASAG
ELQKGNELALPSKYVNFLYLASHYEKLKGSPEDNEQKQLFVEQHKHYLDEIIEQISEFSKRVI
LADANLDKVLSAYNKHRDKPIREQAENIIHLFTLTNLGAPAAFKYFDTTIDRKRYTSTKEVLDA
TLIHQSITGLYETRIDLSQLGGDSGGSPKKKRKV
ABEmax, SEQ ID NO: 140
MKRTADGSEFESPKKKRKVSEVEFSHEYWMRHALTLAKRAWDEREVPVGAVLVHNNRVIG
EGWNRPIGRHDPTAHAEIMALRQGGLVMQNYRLIDATLYVTLEPCVMCAGAMIHSRIGRW
FGARDAKTGAAGSLMDVLHHPGMNHRVEITEGILADECAALLSDFFRMRRQEIKAQKKAQS
STDSGGSSGGSSGSETPGTSESATPESSGGSSGGSSEVEFSHEYWMRHALTLAKRARDE
REVPVGAVLVLNNRVIGEGWNRAIGLHDPTAHAEIMALRQGGLVMQNYRLIDATLYVTFEP
CVMCAGAMIHSRIGRVVFGVRNAKTGAAGSLMDVLHYPGMNHRVEITEGILADECAALLCY
FFRMPRQVFNAQKKAQSSTDSGGSSGGSSGSETPGTSESATPESSGGSSGGSDKKYSIG
LAIGTNSVGWAVITDEYKVPSKKFKVLGNTDRHSIKKNLIGALLFDSGETAEATRLKRTARRR
YTRRKNRICYLQEIFSNEMAKVDDSFFHRLEESFLVEEDKKHERHPIFGNIVDEVAYHEKYP
TIYHLRKKLVDSTDKADLRLIYLALAHMIKFRGHFLIEGDLNPDNSDVDKLFIQLVQTYNQLFE
ENPINASGVDAKAILSARLSKSRRLENLIAQLPGEKKNGLFGNLIALSLGLTPNFKSNFDLAE
DAKLQLSKDTYDDDLDNLLAQIGDQYADLFLAAKNLSDAILLSDILRVNTEITKAPLSASMIKR
YDEHHQDLTLLKALVRQQLPEKYKEIFFDQSKNGYAGYIDGGASQEEFYKFIKPILEKMDGT
EELLVKLNREDLLRKQRTFDNGSIPHQIHLGELHAILRRQEDFYPFLKDNREKIEKILTFRIPY
YVGPLARGNSRFAWMTRKSEETITPWNFEEVVDKGASAQSFIERMTNFDKNLPNEKVLPK
HSLLYEYFTVYNELTKVKYVTEGMRKPAFLSGEQKKAIVDLLFKTNRKVTVKQLKEDYFKKIE
CFDSVEISGVEDRFNASLGTYHDLLKIIKDKDFLDNEENEDILEDIVLTLTLFEDREMIEERLKT
YAHLFDDKVMKQLKRRRYTGWGRLSRKLINGIRDKQSGKTILDFLKSDGFANRNFMQLIHD
DSLTFKEDIQKAQVSGQGDSLHEHIANLAGSPAIKKGILQTVKVVDELVKVMGRHKPENIVIE
MARENQTTQKGQKNSRERMKRIEEGIKELGSQILKEHPVENTQLQNEKLYLYYLQNGRDM
YVDQELDINRLSDYDVDHIVPQSFLKDDSIDNKVLTRSDKNRGKSDNVPSEEVVKKMKNYW
RQLLNAKLITQRKFDNLTKAERGGLSELDKAGFIKRQLVETRQITKHVAQILDSRMNTKYDE
NDKLIREVKVITLKSKLVSDFRKDFQFYKVREINNYHHAHDAYLNAVVGTALIKKYPKLESEF
VYGDYKVYDVRKMIAKSEQEIGKATAKYFFYSNIMNFFKTEITLANGEIRKRPLIETNGETGEI
VWDKGRDFATVRKVLSMPQVNIVKKTEVQTGGFSKESILPKRNSDKLIARKKDWDPKKYGG
FDSPTVAYSVLVVAKVEKGKSKKLKSVKELLGITIMERSSFEKNPIDFLEAKGYKEVKKDLIIK
LPKYSLFELENGRKRMLASAGELQKGNELALPSKYVNFLYLASHYEKLKGSPEDNEQKQLF
VEQHKHYLDEIIEQISEFSKRVILADANLDKVLSAYNKHRDKPIREQAENIIHLFTLTNLGAPAA
FKYFDTTIDRKRYTSTKEVLDATLIHQSITGLYETRIDLSQLGGDSGGSKRTADGSEFEPKKK
RKV
SpACE, SEQ ID NO: 140
MKRTADGSEFESPKKKRKVSEVEFSHEYWMRHALTLAKRARDEREVPVGAVLVLNNRVIG
EGWNRAIGLHDPTAHAEIMALRQGGLVMQNYRLIDATLYGTFEPCVMCAGAMIHSRIGRVV
FGVRNAKTGAAGSLMDVLHYPGMNHRVEITEGILADECAALLCYFFRMPRQVFNAQKKAQ
SSTDSGGSSGGSSGSETPGTSESATPESSGGSSGGSDKKYSIGLAIGTNSVGWAVITDEYK
VPSKKFKVLGNTDRHSIKKNLIGALLFDSGETAEATRLKRTARRRYTRRKNRICYLQEIFSNE
MAKVDDSFFHRLEESFLVEEDKKHERHPIFGNIVDEVAYHEKYPTIYHLRKKLVDSTDKADL
RLIYLALAHMIKFRGHFLIEGDLNPDNSDVDKLFIQLVQTYNQLFEENPINASGVDAKAILSAR
LSKSRRLENLIAQLPGEKKNGLFGNLIALSLGLTPNFKSNFDLAEDAKLQLSKDTYDDDLDNL
LAQIGDQYADLFLAAKNLSDAILLSDILRVNTEITKAPLSASMIKRYDEHHQDLTLLKALVRQQ
LPEKYKEIFFDQSKNGYAGYIDGGASQEEFYKFIKPILEKMDGTEELLVKLNREDLLRKQRTF
DNGSIPHQIHLGELHAILRRQEDFYPFLKDNREKIEKILTFRIPYYVGPLARGNSRFAWMTRK
SEETITPWNFEEVVDKGASAQSFIERMTNFDKNLPNEKVLPKHSLLYEYFTVYNELTKVKYV
TEGMRKPAFLSGEQKKAIVDLLFKTNRKVTVKQLKEDYFKKIECFDSVEISGVEDRFNASLG
TYHDLLKIIKDKDFLDNEENEDILEDIVLTLTLFEDREMIEERLKTYAHLFDDKVMKQLKRRRY
TGWGRLSRKLINGIRDKQSGKTILDFLKSDGFANRNFMQLIHDDSLTFKEDIQKAQVSGQGD
SLHEHIANLAGSPAIKKGILQTVKVVDELVKVMGRHKPENIVIEMARENQTTQKGQKNSRER
MKRIEEGIKELGSQILKEHPVENTQLQNEKLYLYYLQNGRDMYVDQELDINRLSDYDVDHIV
PQSFLKDDSIDNKVLTRSDKNRGKSDNVPSEEVVKKMKNYWRQLLNAKLITQRKFDNLTKA
ERGGLSELDKAGFIKRQLVETRQITKHVAQILDSRMNTKYDENDKLIREVKVITLKSKLVSDF
RKDFQFYKVREINNYHHAHDAYLNAVVGTALIKKYPKLESEFVYGDYKVYDVRKMIAKSEQE
IGKATAKYFFYSNIMNFFKTEITLANGEIRKRPLIETNGETGEIVWDKGRDFATVRKVLSMPQ
VNIVKKTEVQTGGFSKESILPKRNSDKLIARKKDWDPKKYGGFDSPTVAYSVLVVAKVEKGK
SKKLKSVKELLGITIMERSSFEKNPIDFLEAKGYKEVKKDLIIKLPKYSLFELENGRKRMLASA
GELQKGNELALPSKYVNFLYLASHYEKLKGSPEDNEQKQLFVEQHKHYLDEIIEQISEFSKR
VILADANLDKVLSAYNKHRDKPIREQAENIIHLFTLTNLGAPAAFKYFDTTIDRKRYTSTKEVL
DATLIHQSITGLYETRIDLSQLGGDSGGSKRTADGSEFEPKKKRKVSGGSSGGSSGSETPG
TSESATPESSGGSSGGSTDAEYVRIHEKLDIYTFKKQFFNNKKSVSHRCYVLFELKRRGER
RACFWGYAVNKPQSGTERGIHAEIFSIRKVEEYLRDNPGQFTINWYSSWSPCADCAEKILE
WYNQELRGNGHTLKIWACKLYYEKNARNQIGLWNLRDNGVGLNVMVSEHYQCCRKIFIQS
SHNQLNENRWLEKTLKRAEKWRSELSIMIQVKILHTTKSPAVSGGSGGSGGSTNLSDIIEKE
TGKQLVIQESILMLPEEVEEVIGNKPESDILVHTAYDESTDENVMLLTSDAPEYKPWALVIQD
SNGENKIKMLSGGSGGSGGSTNLSDIIEKETGKQLVIQESILMLPEEVEEVIGNKPESDILVH
TAYDESTDENVMLLTSDAPEYKPWALVIQDSNGENKIKMLGSGATNFSLLKQAGDVEENPG
PMVSKGEELFTGVVPILVELDGDVNGHKFSVSGEGEGDATYGKLTLKFICTTGKLPVPWPT
LVTTLTYGVQCFSRYPDHMKQHDFFKSAMPEGYVQERTIFFKDDGNYKTRAEVKFEGDTL
VNRIELKGIDFKEDGNILGHKLEYNYNSHNVYIMADKQKNGIKVNFKIRHNIEDGSVQLADHY
QQNTPIGDGPVLLPDNHYLSTQSALSKDPNEKRDHMVLLEFVTAAGITLGMDELYKSGGSP
KKKRK
SPACEΔUGI, SEQ ID NO: 141
MKRTADGSEFESPKKKRKVSEVEFSHEYWMRHALTLAKRARDEREVPVGAVLVLNNRVIG
EGWNRAIGLHDPTAHAEIMALRQGGLVMQNYRLIDATLYGTFEPCVMCAGAMIHSRIGRVV
FGVRNAKTGAAGSLMDVLHYPGMNHRVEITEGILADECAALLCYFFRMPRQVFNAQKKAQ
SSTDSGGSSGGSSGSETPGTSESATPESSGGSSGGSDKKYSIGLAIGTNSVGWAVITDEYK
VPSKKFKVLGNTDRHSIKKNLIGALLFDSGETAEATRLKRTARRRYTRRKNRICYLQEIFSNE
MAKVDDSFFHRLEESFLVEEDKKHERHPIFGNIVDEVAYHEKYPTIYHLRKKLVDSTDKADL
RLIYLALAHMIKFRGHFLIEGDLNPDNSDVDKLFIQLVQTYNQLFEENPINASGVDAKAILSAR
LSKSRRLENLIAQLPGEKKNGLFGNLIALSLGLTPNFKSNFDLAEDAKLQLSKDTYDDDLDNL
LAQIGDQYADLFLAAKNLSDAILLSDILRVNTEITKAPLSASMIKRYDEHHQDLTLLKALVRQQ
LPEKYKEIFFDQSKNGYAGYIDGGASQEEFYKFIKPILEKMDGTEELLVKLNREDLLRKQRTF
DNGSIPHQIHLGELHAILRRQEDFYPFLKDNREKIEKILTFRIPYYVGPLARGNSRFAWMTRK
SEETITPWNFEEVVDKGASAQSFIERMTNFDKNLPNEKVLPKHSLLYEYFTVYNELTKVKYV
TEGMRKPAFLSGEQKKAIVDLLFKTNRKVTVKQLKEDYFKKIECFDSVEISGVEDRFNASLG
TYHDLLKIIKDKDFLDNEENEDILEDIVLTLTLFEDREMIEERLKTYAHLFDDKVMKQLKRRRY
TGWGRLSRKLINGIRDKQSGKTILDFLKSDGFANRNFMQLIHDDSLTFKEDIQKAQVSGQGD
SLHEHIANLAGSPAIKKGILQTVKVVDELVKVMGRHKPENIVIEMARENQTTQKGQKNSRER
MKRIEEGIKELGSQILKEHPVENTQLQNEKLYLYYLQNGRDMYVDQELDINRLSDYDVDHIV
PQSFLKDDSIDNKVLTRSDKNRGKSDNVPSEEVVKKMKNYWRQLLNAKLITQRKFDNLTKA
ERGGLSELDKAGFIKRQLVETRQITKHVAQILDSRMNTKYDENDKLIREVKVITLKSKLVSDF
RKDFQFYKVREINNYHHAHDAYLNAVVGTALIKKYPKLESEFVYGDYKVYDVRKMIAKSEQE
IGKATAKYFFYSNIMNFFKTEITLANGEIRKRPLIETNGETGEIVWDKGRDFATVRKVLSMPQ
VNIVKKTEVQTGGFSKESILPKRNSDKLIARKKDWDPKKYGGFDSPTVAYSVLVVAKVEKGK
SKKLKSVKELLGITIMERSSFEKNPIDFLEAKGYKEVKKDLIIKLPKYSLFELENGRKRMLASA
GELQKGNELALPSKYVNFLYLASHYEKLKGSPEDNEQKQLFVEQHKHYLDEIIEQISEFSKR
VILADANLDKVLSAYNKHRDKPIREQAENIIHLFTLTNLGAPAAFKYFDTTIDRKRYTSTKEVL
DATLIHQSITGLYETRIDLSQLGGDSGGSKRTADGSEFEPKKKRKVSGGSSGGSSGSETPG
TSESATPESSGGSSGGSTDAEYVRIHEKLDIYTFKKQFFNNKKSVSHRCYVLFELKRRGER
RACFWGYAVN KPQSGTERGIHAEIFSIRKVEEYLRDNPGQFTINWYSSWSPCADCAEKILE
WYNQELRGNGHTLKIWACKLYYEKNARNQIGLWNLRDNGVGLNVMVSEHYQCCRKIFIQS
SHNQLNENRWLEKTLKRAEKWRSELSIMIQVKILHTTKSPAVGSGATNFSLLKQAGDVEEN
PGPMVSKGEELFTGWPILVELDGDVNGHKFSVSGEGEGDATYGKLTLKFICTTGKLPVPW
PTLVTTLTYGVQCFSRYPDHMKQHDFFKSAMPEGYVQERTIFFKDDGNYKTRAEVKFEGD
TLVNRIELKGIDFKEDGNILGHKLEYNYNSHNVYIMADKQKNGIKVNFKIRHNIEDGSVQLAD
HYQQNTPIGDGPVLLPDNHYLSTQSALSKDPNEKRDHMVLLEFVTAAGITLGMDELYKSGG
SPKKKRKV
SPACE-NG, SEQ ID NO: 142
MKRTADGSEFESPKKKRKVSEVEFSHEYWMRHALTLAKRARDEREVPVGAVLVLNNRVIG
EGWNRAIGLHDPTAHAEIMALRQGGLVMQNYRLIDATLYGTFEPCVMCAGAMIHSRIGRVV
FGVRNAKTGAAGSLMDVLHYPGMNHRVEITEGILADECAALLCYFFRMPRQVFNAQKKAQ
SSTDSGGSSGGSSGSETPGTSESATPESSGGSSGGSDKKYSIGLAIGTNSVGWAVITDEYK
VPSKKFKVLGNTDRHSIKKNLIGALLFDSGETAEATRLKRTARRRYTRRKNRICYLQEIFSNE
MAKVDDSFFHRLEESFLVEEDKKHERHPIFGNIVDEVAYHEKYPTIYHLRKKLVDSTDKADL
RLIYLALAHMIKFRGHFLIEGDLNPDNSDVDKLFIQLVQTYNQLFEENPINASGVDAKAILSAR
LSKSRRLENLIAQLPGEKKNGLFGNLIALSLGLTPNFKSNFDLAEDAKLQLSKDTYDDDLDNL
LAQIGDQYADLFLAAKNLSDAILLSDILRVNTEITKAPLSASMIKRYDEHHQDLTLLKALVRQQ
LPEKYKEIFFDQSKNGYAGYIDGGASQEEFYKFIKPILEKMDGTEELLVKLNREDLLRKQRTF
DNGSIPHQIHLGELHAILRRQEDFYPFLKDNREKIEKILTFRIPYYVGPLARGNSRFAWMTRK
SEETITPWNFEEVVDKGASAQSFIERMTNFDKNLPNEKVLPKHSLLYEYFTVYNELTKVKYV
TEGMRKPAFLSGEQKKAIVDLLFKTNRKVTVKQLKEDYFKKIECFDSVEISGVEDRFNASLG
TYHDLLKIIKDKDFLDNEENEDILEDIVLTLTLFEDREMIEERLKTYAHLFDDKVMKQLKRRRY
TGWGRLSRKLINGIRDKQSGKTILDFLKSDGFANRNFMQLIHDDSLTFKEDIQKAQVSGQGD
SLHEHIANLAGSPAIKKGILQTVKVVDELVKVMGRHKPENIVIEMARENQTTQKGQKNSRER
MKRIEEGIKELGSQILKEHPVENTQLQNEKLYLYYLQNGRDMYVDQELDINRLSDYDVDHIV
PQSFLKDDSIDNKVLTRSDKNRGKSDNVPSEEVVKKMKNYWRQLLNAKLITQRKFDNLTKA
ERGGLSELDKAGFIKRQLVETRQITKHVAQILDSRMNTKYDENDKLIREVKVITLKSKLVSDF
RKDFQFYKVREINNYHHAHDAYLNAVVGTALIKKYPKLESEFVYGDYKVYDVRKMIAKSEQE
IGKATAKYFFYSNIMNFFKTEITLANGEIRKRPLIETNGETGEIVWDKGRDFATVRKVLSMPQ
VNIVKKTEVQTGGFSKESIRPKRNSDKLIARKKDWDPKKYGGFVSPTVAYSVLVVAKVEKG
KSKKLKSVKELLGITIMERSSFEKNPIDFLEAKGYKEVKKDLIIKLPKYSLFELENGRKRMLAS
ARFLQKGNELALPSKYVNFLYLASHYEKLKGSPEDNEQKQLFVEQHKHYLDEIIEQISEFSK
RVILADANLDKVLSAYNKHRDKPIREQAENIIHLFTLTNLGAPRAFKYFDTTIDRKVYRSTKEV
LDATLIHQSITGLYETRIDLSQLGGDSGGSKRTADGSEFEPKKKRKVSGGSSGGSSGSETP
GTSESATPESSGGSSGGSTDAEYVRIHEKLDIYTFKKQFFNNKKSVSHRCYVLFELKRRGE
RRACFWGYAVNKPQSGTERGIHAEIFSIRKVEEYLRDNPGQFTINWYSSWSPCADCAEKIL
EWYNQELRGNGHTLKIWACKLYYEKNARNQIGLWNLRDNGVGLNVMVSEHYQCCRKIFIQ
SSHNQLNENRWLEKTLKRAEKWRSELSIMIQVKILHTTKSPAVSGGSGGSGGSTNLSDIIEK
ETGKQLVIQESILMLPEEVEEVIGNKPESDILVHTAYDESTDENVMLLTSDAPEYKPWALVIQ
DSNGENKIKMLSGGSGGSGGSTNLSDIIEKETGKQLVIQESILMLPEEVEEVIGNKPESDILV
HTAYDESTDENVMLLTSDAPEYKPWALVIQDSNGENKIKMLGSGATNFSLLKQAGDVEENP
GPMVSKGEELFTGVVPILVELDGDVNGHKFSVSGEGEGDATYGKLTLKFICTTGKLPVPWP
TLVTTLTYGVQCFSRYPDHMKQHDFFKSAMPEGYVQERTIFFKDDGNYKTRAEVKFEGDTL
VNRIELKGIDFKEDGNILGHKLEYNYNSHNVYIMADKQKNGIKVNFKIRHNIEDGSVQLADHY
QQNTPIGDGPVLLPDNHYLSTQSALSKDPNEKRDHMVLLEFVTAAGITLGMDELYKSGGSP
KKKRKV
SPACE-VRQR, SEQ ID NO: 143
MKRTADGSEFESPKKKRKVSEVEFSHEYWMRHALTLAKRARDEREVPVGAVLVLNNRVIG
EGWNRAIGLHDPTAHAEIMALRQGGLVMQNYRLIDATLYGTFEPCVMCAGAMIHSRIGRVV
FGVRNAKTGAAGSLMDVLHYPGMNHRVEITEGILADECAALLCYFFRMPRQVFNAQKKAQ
SSTDSGGSSGGSSGSETPGTSESATPESSGGSSGGSDKKYSIGLAIGTNSVGWAVITDEYK
VPSKKFKVLGNTDRHSIKKNLIGALLFDSGETAEATRLKRTARRRYTRRKNRICYLQEIFSNE
MAKVDDSFFHRLEESFLVEEDKKHERHPIFGNIVDEVAYHEKYPTIYHLRKKLVDSTDKADL
RLIYLALAHMIKFRGHFLIEGDLNPDNSDVDKLFIQLVQTYNQLFEENPINASGVDAKAILSAR
LSKSRRLENLIAQLPGEKKNGLFGNLIALSLGLTPNFKSNFDLAEDAKLQLSKDTYDDDLDNL
LAQIGDQYADLFLAAKNLSDAILLSDILRVNTEITKAPLSASMIKRYDEHHQDLTLLKALVRQQ
LPEKYKEIFFDQSKNGYAGYIDGGASQEEFYKFIKPILEKMDGTEELLVKLNREDLLRKQRTF
DNGSIPHQIHLGELHAILRRQEDFYPFLKDNREKIEKILTFRIPYYVGPLARGNSRFAWMTRK
SEETITPWNFEEVVDKGASAQSFIERMTNFDKNLPNEKVLPKHSLLYEYFTVYNELTKVKYV
TEGMRKPAFLSGEQKKAIVDLLFKTNRKVTVKQLKEDYFKKIECFDSVEISGVEDRFNASLG
TYHDLLKIIKDKDFLDNEENEDILEDIVLTLTLFEDREMIEERLKTYAHLFDDKVMKQLKRRRY
TGWGRLSRKLINGIRDKQSGKTILDFLKSDGFANRNFMQLIHDDSLTFKEDIQKAQVSGQGD
SLHEHIANLAGSPAIKKGILQTVKVVDELVKVMGRHKPENIVIEMARENQTTQKGQKNSRER
MKRIEEGIKELGSQILKEHPVENTQLQNEKLYLYYLQNGRDMYVDQELDINRLSDYDVDHIV
PQSFLKDDSIDNKVLTRSDKNRGKSDNVPSEEVVKKMKNYWRQLLNAKLITQRKFDNLTKA
ERGGLSELDKAGFIKRQLVETRQITKHVAQILDSRMNTKYDENDKLIREVKVITLKSKLVSDF
RKDFQFYKVREINNYHHAHDAYLNAVVGTALIKKYPKLESEFVYGDYKVYDVRKMIAKSEQE
IGKATAKYFFYSNIMNFFKTEITLANGEIRKRPLIETNGETGEIVWDKGRDFATVRKVLSMPQ
VNIVKKTEVQTGGFSKESILPKRNSDKLIARKKDWDPKKYGGFVSPTVAYSVLVVAKVEKGK
SKKLKSVKELLGITIMERSSFEKNPIDFLEAKGYKEVKKDLIIKLPKYSLFELENGRKRMLASA
RELQKGNELALPSKYVNFLYLASHYEKLKGSPEDNEQKQLFVEQHKHYLDEIIEQISEFSKR
VILADANLDKVLSAYNKHRDKPIREQAENIIHLFTLTNLGAPAAFKYFDTTIDRKQYRSTKEVL
DATLIHQSITGLYETRIDLSQLGGDSGGSKRTADGSEFEPKKKRKVSGGSSGGSSGSETPG
TSESATPESSGGSSGGSTDAEYVRIHEKLDIYTFKKQFFNNKKSVSHRCYVLFELKRRGER
RACFWGYAVNKPQSGTERGIHAEIFSIRKVEEYLRDNPGQFTINWYSSWSPCADCAEKILE
WYNQELRGNGHTLKIWACKLYYEKNARNQIGLWNLRDNGVGLNVMVSEHYQCCRKIFIQS
SHNQLNENRWLEKTLKRAEKWRSELSIMIQVKILHTTKSPAVSGGSGGSGGSTNLSDIIEKE
TGKQLVIQESILMLPEEVEEVIGNKPESDILVHTAYDESTDENVMLLTSDAPEYKPWALVIQD
SNGENKIKMLSGGSGGSGGSTNLSDIIEKETGKQLVIQESILMLPEEVEEVIGNKPESDILVH
TAYDESTDENVMLLTSDAPEYKPWALVIQDSNGENKIKMLGSGATNFSLLKQAGDVEENPG
PMVSKGEELFTGVVPILVELDGDVNGHKFSVSGEGEGDATYGKLTLKFICTTGKLPVPWPT
LVTTLTYGVQCFSRYPDHMKQHDFFKSAMPEGYVQERTIFFKDDGNYKTRAEVKFEGDTL
VNRIELKGIDFKEDGNILGHKLEYNYNSHNVYIMADKQKNGIKVNFKIRHNIEDGSVQLADHY
QQNTPIGDGPVLLPDNHYLSTQSALSKDPNEKRDHMVLLEFVTAAGITLGMDELYKSGGSP
KKKRKV
SPACE-NAA, SEQ ID NO: 144
MKRTADGSEFESPKKKRKVSEVEFSHEYWMRHALTLAKRARDEREVPVGAVLVLNNRVIG
EGWNRAIGLHDPTAHAEIMALRQGGLVMQNYRLIDATLYGTFEPCVMCAGAMIHSRIGRVV
FGVRNAKTGAAGSLMDVLHYPGMNHRVEITEGILADECAALLCYFFRMPRQVFNAQKKAQ
SSTDSGGSSGGSSGSETPGTSESATPESSGGSSGGSDKKYSIGLAIGTNSVGWAVITDEYK
VPSKKFKVLGNTDRHSIKKNLIGALLFDSGETAEATRLKRTARRRYTRRKNRICYLQEIFSNE
MAKVDDSFFHRLEESFLVEEDKKHERHPIFGNIVDEVAYHEKYPTIYHLRKKLVDSTDKADL
RLIYLALAHMIKFRGHFLIEGDLNPDNSDVDKLFIQLVQTYNQLFEENPINASGVDAKAILSAR
LSKSRRLENLIAQLPGEKKNGLFGNLIALSLGLTPNFKSNFDLAEDAKLQLSKDTYDDDLDNL
LAQIGDQYADLFLAAKNLSDAILLSDILRVNTEITKAPLSASMIKRYDEHHQDLTLLKALVRQQ
LPEKYKEIFFDQSKNGYAGYIDGGASQEEFYKFIKPILEKMDGTEELLVKLNREDLLRKQRTF
DNGSIPHQIHLGELHAILRRQEDFYPFLKDNREKIEKILTFRIPYYVGPLARGNSRFAWMTRK
SEETITPWNFEEWDKGASAQSFIERMTNFDKNLPNEKVLPKHSLLYEYFTVYNELTKVKYV
TEGMRKPAFLSGEQKKAIVDLLFKTNRKVTVKQLKEDYFKKIECFDSVEISGVEDRFNASLG
TYHDLLKIIKDKDFLDNEENEDILEDIVLTLTLFEDREMIEERLKTYAHLFDDKVMKQLKRRRY
TGWGRLSRKLINGIRDKQSGKTILDFLKSDGFANRNFMQLIHDDSLTFKEDIQKAQVSGQGD
SLHEHIANLAGSPAIKKGILQTVKVVDELVKVMGRHKPENMEMARENQTTQKGQKNSRER
MKRIEEGIKELGSQILKEHPVENTQLQNEKLYLYYLQNGRDMYVDQELDINRLSDYDVDHIV
PQSFLKDDSIDNKVLTRSDKNRGKSDNVPSEEVVKKMKNYWRQLLNAKLITQRKFDNLTKA
ERGGLSELDKAGFIKRQLVETRQITKHVAQILDSRMNTKYDENDKLIREVKVITLKSKLVSDF
RKDFQFYKVREINNYHHAHDAYLNAVVGTALIKKYPKLESEFVYGDYKVYDVRKMIAKSEQE
IGKATAKYFFYSNIMNFFKTEITLANGEIRKRPLIETNGETGEIVWDKGRDFATVRKVLSMPQ
VNIVKKTEIQTVGQNGGLFDDNPKSPLEVTPSKLVPLKKELNPKKYGGYQKPTTAYPVLLITD
TKQLIPISVMNKKQFEQNPVKFLRDRGYQQVGKNDFIKLPKYTLVDIGDGIKRLWASSKEIHK
GNQLVVSKKSQILLYHAHHLDSDLSNDYLQNHNQQFDVLFNEIISFSKKCKLGKEHIQKIENV
YSNKKNSASIEELAESFIKLLGFTQLGATSPFNFLGVKLNQKQYKGKKDYILPCTEGTLIRQSI
TGLYETRVDLSKIGEDSGGSKRTADGSEFEPKKKRKVSGGSSGGSSGSETPGTSESATPE
SSGGSSGGSTDAEYVRIHEKLDIYTFKKQFFNNKKSVSHRCYVLFELKRRGERRACFWGYA
VNKPQSGTERGIHAEIFSIRKVEEYLRDNPGQFTINWYSSWSPCADCAEKILEWYNQELRG
NGHTLKIWACKLYYEKNARNQIGLWNLRDNGVGLNVMVSEHYQCCRKIFIQSSHNQLNEN
RWLEKTLKRAEKWRSELSIMIQVKILHTTKSPAVSGGSGGSGGSTNLSDIIEKETGKQLVIQE
SILMLPEEVEEVIGNKPESDILVHTAYDESTDENVMLLTSDAPEYKPWALVIQDSNGENKIKM
LSGGSGGSGGSTNLSDIIEKETGKQLVIQESILMLPEEVEEVIGNKPESDILVHTAYDESTDE
NVMLLTSDAPEYKPWALVIQDSNGENKIKMLGSGATNFSLLKQAGDVEENPGPMVSKGEE
LFTGVVPILVELDGDVNGHKFSVSGEGEGDATYGKLTLKFICTTGKLPVPWPTLVTTLTYGV
QCFSRYPDHMKQHDFFKSAMPEGYVQERTIFFKDDGNYKTRAEVKFEGDTLVNRIELKGID
FKEDGNILGHKLEYNYNSHNVYIMADKQKNGIKVNFKIRHNIEDGSVQLADHYQQNTPIGDG
PVLLPDNHYLSTQSALSKDPNEKRDHMVLLEFVTAAGITLGMDELYKSGGSPKKKRKV
BE4max-ΔUG1-eUNG, SEQ ID NO: 147
MKRTADGSEFESPKKKRKVSSETGPVAVDPTLRRRIEPHEFEVFFDPRELRKETCLLYEIN
WGGRHSIWRHTSQNTNKHVEVNFIEKFTTERYFCPNTRCSITWFLSWSPCGECSRAITEFL
SRYPHVTLFIYIARLYHHADPRNRQGLRDLISSGVTIQIMTEQESGYCWRNFVNYSPSNEAH
WPRYPHLWVRLYVLELYCIILGLPPCLNILRRKQPQLTFFTIALQSCHYQRLPPHILWATGLK
SGGSSGGSSGSETPGTSESATPESSGGSSGGSDKKYSIGLAIGTNSVGWAVITDEYKVPSK
KFKVLGNTDRHSIKKNLIGALLFDSGETAEATRLKRTARRRYTRRKNRICYLQEIFSNEMAKV
DDSFFHRLEESFLVEEDKKHERHPIFGNIVDEVAYHEKYPTIYHLRKKLVDSTDKADLRLIYL
ALAHMIKFRGHFLIEGDLNPDNSDVDKLFIQLVQTYNQLFEENPINASGVDAKAILSARLSKS
RRLENLIAQLPGEKKNGLFGNLIALSLGLTPNFKSNFDLAEDAKLQLSKDTYDDDLDNLLAQI
GDQYADLFLAAKNLSDAILLSDILRVNTEITKAPLSASMIKRYDEHHQDLTLLKALVRQQLPEK
YKEIFFDQSKNGYAGYIDGGASQEEFYKFIKPILEKMDGTEELLVKLNREDLLRKQRTFDNG
SIPHQIHLGELHAILRRQEDFYPFLKDNREKIEKILTFRIPYYVGPLARGNSRFAWMTRKSEE
TITPWNFEEVVDKGASAQSFIERMTNFDKNLPNEKVLPKHSLLYEYFTVYNELTKVKYVTEG
MRKPAFLSGEQKKAIVDLLFKTNRKVTVKQLKEDYFKKIECFDSVEISGVEDRFNASLGTYH
DLLKIIKDKDFLDNEENEDILEDIVLTLTLFEDREMIEERLKTYAHLFDDKVMKQLKRRRYTGW
GRLSRKLINGIRDKQSGKTILDFLKSDGFANRNFMQLIHDDSLTFKEDIQKAQVSGQGDSLH
EHIANLAGSPAIKKGILQTVKVVDELVKVMGRHKPENIVIEMARENQTTQKGQKNSRERMKR
IEEGIKELGSQILKEHPVENTQLQNEKLYLYYLQNGRDMYVDQELDINRLSDYDVDHIVPQSF
LKDDSIDNKVLTRSDKNRGKSDNVPSEEVVKKMKNYWRQLLNAKLITQRKFDNLTKAERGG
LSELDKAGFIKRQLVETRQITKHVAQILDSRMNTKYDENDKLIREVKVITLKSKLVSDFRKDF
QFYKVREINNYHHAHDAYLNAVVGTALIKKYPKLESEFVYGDYKVYDVRKMIAKSEQEIGKA
TAKYFFYSNIMNFFKTEITLANGEIRKRPLIETNGETGEIVWDKGRDFATVRKVLSMPQVNIV
KKTEVQTGGFSKESILPKRNSDKLIARKKDWDPKKYGGFDSPTVAYSVLVVAKVEKGKSKK
LKSVKELLGITIMERSSFEKNPIDFLEAKGYKEVKKDLIIKLPKYSLFELENGRKRMLASAGEL
QKGNELALPSKYVNFLYLASHYEKLKGSPEDNEQKQLFVEQHKHYLDEIIEQISEFSKRVILA
DANLDKVLSAYNKHRDKPIREQAENIIHLFTLTNLGAPAAFKYFDTTIDRKRYTSTKEVLDATL
IHQSITGLYETRIDLSQLGGDSGGSGGSGGSANELTWHDVLAEEKQQPYFLNTLQTVASER
QSGVTIYPPQKDVFNAFRFTELGDVKVVILGQDPYHGPGQAHGLAFSVRPGIAIPPSLLNMY
KELENTIPGFTRPNHGYLESWARQGVLLLNTVLTVRAGQAHSHASLGWETFTDKVISLINQH
REGVVFLLWGSHAQKKGAIIDKQRHHVLKAPHPSPLSAHRGFFGCNHFVLANQWLEQRGE
TPIDWMPVLPAESESGGSKRTADGSEFEPKKKRKVGGGGSGATNFSLLKQAGDVEENPG
PMVSKGEELFTGWPILVELDGDVNGHKFSVSGEGEGDATYGKLTLKFICTTGKLPVPWPT
LVTTLTYGVQCFSRYPDHMKQHDFFKSAMPEGYVQERTIFFKDDGNYKTRAEVKFEGDTL
VNRIELKGIDFKEDGNILGHKLEYNYNSHNVYIMADKQKNGIKVNFKIRHNIEDGSVQLADHY
QQNTPIGDGPVLLPDNHYLSTQSALSKDPNEKRDHMVLLEFVTAAGITLGMDELYK
BE4max(R33A)-ΔUGI-eUNG, SEQ ID NO: 148
MKRTADGSEFESPKKKRKVSSETGPVAVDPTLRRRIEPHEFEVFFDPRELAKETCLL
YEINWGGRHSIWRHTSQNTNKHVEVNFIEKFTTERYFCPNTRCSITWFLSWSPCGE
CSRAITEFLSRYPHVTLFIYIARLYHHADPRNRQGLRDLISSGVTIQIMTEQESGYCW
RNFVNYSPSNEAHWPRYPHLWVRLYVLELYCIILGLPPCLNILRRKQPQLTFFTIALQ
SCHYQRLPPHILWATGLKSGGSSGGSSGSETPGTSESATPESSGGSSGGSDKKYS
IGLAIGTNSVGWAVITDEYKVPSKKFKVLGNTDRHSIKKNLIGALLFDSGETAEATRL
KRTARRRYTRRKNRICYLQEIFSNEMAKVDDSFFHRLEESFLVEEDKKHERHPIFGN
IVDEVAYHEKYPTIYHLRKKLVDSTDKADLRLIYLALAHMIKFRGHFLIEGDLNPDNSD
VDKLFIQLVQTYNQLFEENPINASGVDAKAILSARLSKSRRLENLIAQLPGEKKNGLF
GNLIALSLGLTPNFKSNFDLAEDAKLQLSKDTYDDDLDNLLAQIGDQYADLFLAAKNL
SDAILLSDILRVNTEITKAPLSASMIKRYDEHHQDLTLLKALVRQQLPEKYKEIFFDQS
KNGYAGYIDGGASQEEFYKFIKPILEKMDGTEELLVKLNREDLLRKQRTFDNGSIPH
QIHLGELHAILRRQEDFYPFLKDNREKIEKILTFRIPYYVGPLARGNSRFAWMTRKSE
ETITPWNFEEVVDKGASAQSFIERMTNFDKNLPNEKVLPKHSLLYEYFTVYNELTKV
KYVTEGMRKPAFLSGEQKKAIVDLLFKTNRKVTVKQLKEDYFKKIECFDSVEISGVE
DRFNASLGTYHDLLKIIKDKDFLDNEENEDILEDIVLTLTLFEDREMIEERLKTYAHLFD
DKVMKQLKRRRYTGWGRLSRKLINGIRDKQSGKTILDFLKSDGFANRNFMQLIHDD
SLTFKEDIQKAQVSGQGDSLHEHIANLAGSPAIKKGILQTVKVVDELVKVMGRHKPE
NIVIEMARENQTTQKGQKNSRERMKRIEEGIKELGSQILKEHPVENTQLQNEKLYLY
YLQNGRDMYVDQELDINRLSDYDVDHIVPQSFLKDDSIDNKVLTRSDKNRGKSDNV
PSEEVVKKMKNYWRQLLNAKLITQRKFDNLTKAERGGLSELDKAGFIKRQLVETRQI
TKHVAQILDSRMNTKYDENDKLIREVKVITLKSKLVSDFRKDFQFYKVREINNYHHAH
DAYLNAVVGTALIKKYPKLESEFVYGDYKVYDVRKMIAKSEQEIGKATAKYFFYSNIM
NFFKTEITLANGEIRKRPLIETNGETGEIVWDKGRDFATVRKVLSMPQVNIVKKTEVQ
TGGFSKESILPKRNSDKLIARKKDWDPKKYGGFDSPTVAYSVLWAKVEKGKSKKL
KSVKELLGITIMERSSFEKNPIDFLEAKGYKEVKKDLIIKLPKYSLFELENGRKRMLAS
AGELQKGNELALPSKYVNFLYLASHYEKLKGSPEDNEQKQLFVEQHKHYLDEIIEQI
SEFSKRVILADANLDKVLSAYNKHRDKPIREQAENIIHLFTLTNLGAPAAFKYFDTTID
RKRYTSTKEVLDATLIHQSITGLYETRIDLSQLGGDSGGSGGSGGSANELTWHDVL
AEEKQQPYFLNTLQTVASERQSGVTIYPPQKDVFNAFRFTELGDVKVVILGQDPYH
GPGQAHGLAFSVRPGIAIPPSLLNMYKELENTIPGFTRPNHGYLESWARQGVLLLNT
VLTVRAGQAHSHASLGWETFTDKVISLINQHREGVVFLLWGSHAQKKGAIIDKQRH
HVLKAPHPSPLSAHRGFFGCNHFVLANQWLEQRGETPIDWMPVLPAESESGGSKR
TADGSEFEPKKKRKVGGGGSGATNFSLLKQAGDVEENPGPMVSKGEELFTGVVPI
LVELDGDVNGHKFSVSGEGEGDATYGKLTLKFICTTGKLPVPWPTLVTTLTYGVQC
FSRYPDHMKQHDFFKSAMPEGYVQERTIFFKDDGNYKTRAEVKFEGDTLVNRIELK
GIDFKEDGNILGHKLEYNYNSHNVYIMADKQKNGIKVNFKIRHNIEDGSVQLADHYQ
QNTPIGDGPVLLPDNHYLSTQSALSKDPNEKRDHMVLLEFVTAAGITLGMDELYK
BE4max(R33A/K34A)-ΔUGI-eUNG, SEQ ID NO: 149
MKRTADGSEFESPKKKRKVSSETGPVAVDPTLRRRIEPHEFEVFFDPRELAAETCLL
YEINWGGRHSIWRHTSQNTNKHVEVNFIEKFTTERYFCPNTRCSITWFLSWSPCGE
CSRAITEFLSRYPHVTLFIYIARLYHHADPRNRQGLRDLISSGVTIQIMTEQESGYCW
RNFVNYSPSNEAHWPRYPHLWVRLYVLELYCIILGLPPCLNILRRKQPQLTFFTIALQ
SCHYQRLPPHILWATGLKSGGSSGGSSGSETPGTSESATPESSGGSSGGSDKKYS
IGLAIGTNSVGWAVITDEYKVPSKKFKVLGNTDRHSIKKNLIGALLFDSGETAEATRL
KRTARRRYTRRKNRICYLQEIFSNEMAKVDDSFFHRLEESFLVEEDKKHERHPIFGN
IVDEVAYHEKYPTIYHLRKKLVDSTDKADLRLIYLALAHMIKFRGHFLIEGDLNPDNSD
VDKLFIQLVQTYNQLFEENPINASGVDAKAILSARLSKSRRLENLIAQLPGEKKNGLF
GNLIALSLGLTPNFKSNFDLAEDAKLQLSKDTYDDDLDNLLAQIGDQYADLFLAAKNL
SDAILLSDILRVNTEITKAPLSASMIKRYDEHHQDLTLLKALVRQQLPEKYKEIFFDQS
KNGYAGYIDGGASQEEFYKFIKPILEKMDGTEELLVKLNREDLLRKQRTFDNGSIPH
QIHLGELHAILRRQEDFYPFLKDNREKIEKILTFRIPYYVGPLARGNSRFAWMTRKSE
ETITPWNFEEVVDKGASAQSFIERMTNFDKNLPNEKVLPKHSLLYEYFTVYNELTKV
KYVTEGMRKPAFLSGEQKKAIVDLLFKTNRKVTVKQLKEDYFKKIECFDSVEISGVE
DRFNASLGTYHDLLKIIKDKDFLDNEENEDILEDIVLTLTLFEDREMIEERLKTYAHLFD
DKVMKQLKRRRYTGWGRLSRKLINGIRDKQSGKTILDFLKSDGFANRNFMQLIHDD
SLTFKEDIQKAQVSGQGDSLHEHIANLAGSPAIKKGILQTVKVVDELVKVMGRHKPE
NIVIEMARENQTTQKGQKNSRERMKRIEEGIKELGSQILKEHPVENTQLQNEKLYLY
YLQNGRDMYVDQELDINRLSDYDVDHIVPQSFLKDDSIDNKVLTRSDKNRGKSDNV
PSEEVVKKMKNYWRQLLNAKLITQRKFDNLTKAERGGLSELDKAGFIKRQLVETRQI
TKHVAQILDSRMNTKYDENDKLIREVKVITLKSKLVSDFRKDFQFYKVREINNYHHAH
DAYLNAVVGTALIKKYPKLESEFVYGDYKVYDVRKMIAKSEQEIGKATAKYFFYSNIM
NFFKTEITLANGEIRKRPLIETNGETGEIVWDKGRDFATVRKVLSMPQVNIVKKTEVQ
TGGFSKESILPKRNSDKLIARKKDWDPKKYGGFDSPTVAYSVLWAKVEKGKSKKL
KSVKELLGITIMERSSFEKNPIDFLEAKGYKEVKKDLIIKLPKYSLFELENGRKRMLAS
AGELQKGNELALPSKYVNFLYLASHYEKLKGSPEDNEQKQLFVEQHKHYLDEIIEQI
SEFSKRVILADANLDKVLSAYNKHRDKPIREQAENIIHLFTLTNLGAPAAFKYFDTTID
RKRYTSTKEVLDATLIHQSITGLYETRIDLSQLGGDSGGSGGSGGSANELTWHDVL
AEEKQQPYFLNTLQTVASERQSGVTIYPPQKDVFNAFRFTELGDVKVVILGQDPYH
GPGQAHGLAFSVRPGIAIPPSLLNMYKELENTIPGFTRPNHGYLESWARQGVLLLNT
VLTVRAGQAHSHASLGWETFTDKVISLINQHREGVVFLLWGSHAQKKGAIIDKQRH
HVLKAPHPSPLSAHRGFFGCNHFVLANQWLEQRGETPIDWMPVLPAESESGGSKR
TADGSEFEPKKKRKVGGGGSGATNFSLLKQAGDVEENPGPMVSKGEELFTGVVPI
LVELDGDVNGHKFSVSGEGEGDATYGKLTLKFICTTGKLPVPWPTLVTTLTYGVQC
FSRYPDHMKQHDFFKSAMPEGYVQERTIFFKDDGNYKTRAEVKFEGDTLVNRIELK
GIDFKEDGNILGHKLEYNYNSHNVYIMADKQKNGIKVNFKIRHNIEDGSVQLADHYQ
QNTPIGDGPVLLPDNHYLSTQSALSKDPNEKRDHMVLLEFVTAAGITLGMDELYK
nCas9-eUNG for BE4max, SEQ ID NO: 150
MKRTADGSEFESPKKKRKVSGGSSGGSSGSETPGTSESATPESSGGSSGGSDKK
YSIGLAIGTNSVGWAVITDEYKVPSKKFKVLGNTDRHSIKKNLIGALLFDSGETAEAT
RLKRTARRRYTRRKNRICYLQEIFSNEMAKVDDSFFHRLEESFLVEEDKKHERHPIF
GNIVDEVAYHEKYPTIYHLRKKLVDSTDKADLRLIYLALAHMIKFRGHFLIEGDLNPDN
SDVDKLFIQLVQTYNQLFEENPINASGVDAKAILSARLSKSRRLENLIAQLPGEKKNG
LFGNLIALSLGLTPNFKSNFDLAEDAKLQLSKDTYDDDLDNLLAQIGDQYADLFLAAK
NLSDAILLSDILRVNTEITKAPLSASMIKRYDEHHQDLTLLKALVRQQLPEKYKEIFFD
QSKNGYAGYIDGGASQEEFYKFIKPILEKMDGTEELLVKLNREDLLRKQRTFDNGSI
PHQIHLGELHAILRRQEDFYPFLKDNREKIEKILTFRIPYYVGPLARGNSRFAWMTRK
SEETITPWNFEEWDKGASAQSFIERMTNFDKNLPNEKVLPKHSLLYEYFTVYNELT
KVKYVTEGMRKPAFLSGEQKKAIVDLLFKTNRKVTVKQLKEDYFKKIECFDSVEISG
VEDRFNASLGTYHDLLKIIKDKDFLDNEENEDILEDIVLTLTLFEDREMIEERLKTYAHL
FDDKVMKQLKRRRYTGWGRLSRKLINGIRDKQSGKTILDFLKSDGFANRNFMQLIH
DDSLTFKEDIQKAQVSGQGDSLHEHIANLAGSPAIKKGILQTVKVVDELVKVMGRHK
PENIVIEMARENQTTQKGQKNSRERMKRIEEGIKELGSQILKEHPVENTQLQNEKLY
LYYLQNGRDMYVDQELDINRLSDYDVDHIVPQSFLKDDSIDNKVLTRSDKNRGKSD
NVPSEEVVKKMKNYWRQLLNAKLITQRKFDNLTKAERGGLSELDKAGFIKRQLVET
RQITKHVAQILDSRMNTKYDENDKLIREVKVITLKSKLVSDFRKDFQFYKVREINNYH
HAHDAYLNAVVGTALIKKYPKLESEFVYGDYKVYDVRKMIAKSEQEIGKATAKYFFY
SNIMNFFKTEITLANGEIRKRPLIETNGETGEIVWDKGRDFATVRKVLSMPQVNIVKK
TEVQTGGFSKESILPKRNSDKLIARKKDWDPKKYGGFDSPTVAYSVLVVAKVEKGK
SKKLKSVKELLGITIMERSSFEKNPIDFLEAKGYKEVKKDLIIKLPKYSLFELENGRKR
MLASAGELQKGNELALPSKYVNFLYLASHYEKLKGSPEDNEQKQLFVEQHKHYLDE
IIEQISEFSKRVILADANLDKVLSAYNKHRDKPIREQAENIIHLFTLTNLGAPAAFKYFD
TTIDRKRYTSTKEVLDATLIHQSITGLYETRIDLSQLGGDSGGSGGSGGSANELTWH
DVLAEEKQQPYFLNTLQTVASERQSGVTIYPPQKDVFNAFRFTELGDVKVVILGQDP
YHGPGQAHGLAFSVRPGIAIPPSLLNMYKELENTIPGFTRPNHGYLESWARQGVLLL
NTVLTVRAGQAHSHASLGWETFTDKVISLINQHREGVVFLLWGSHAQKKGAIIDKQR
HHVLKAPHPSPLSAHRGFFGCNHFVLANQWLEQRGETPIDWMPVLPAESESGGSK
RTADGSEFEPKKKRKVGGGGSGATNFSLLKQAGDVEENPGPMVSKGEELFTGVVP
ILVELDGDVNGHKFSVSGEGEGDATYGKLTLKFICTTGKLPVPWPTLVTTLTYGVQC
FSRYPDHMKQHDFFKSAMPEGYVQERTIFFKDDGNYKTRAEVKFEGDTLVNRIELK
GIDFKEDGNILGHKLEYNYNSHNVYIMADKQKNGIKVNFKIRHNIEDGSVQLADHYQ
QNTPIGDGPVLLPDNHYLSTQSALSKDPNEKRDHMVLLEFVTAAGITLGMDELYK
eUNG-BE4max-ΔUGI, SEQ ID NO: 151
MKRTADGSEFESPKKKRKVANELTWHDVLAEEKQQPYFLNTLQTVASERQSGVTIY
PPQKDVFNAFRFTELGDVKVVILGQDPYHGPGQAHGLAFSVRPGIAIPPSLLNMYKE
LENTIPGFTRPNHGYLESWARQGVLLLNTVLTVRAGQAHSHASLGWETFTDKVISLI
NQHREGVVFLLWGSHAQKKGAIIDKQRHHVLKAPHPSPLSAHRGFFGCNHFVLAN
QWLEQRGETPIDWMPVLPAESESGGSGGSGGSSSETGPVAVDPTLRRRIEPHEFE
VFFDPRELRKETCLLYEINWGGRHSIWRHTSQNTNKHVEVNFIEKFTTERYFCPNTR
CSITWFLSWSPCGECSRAITEFLSRYPHVTLFIYIARLYHHADPRNRQGLRDLISSGV
TIQIMTEQESGYCWRNFVNYSPSNEAHWPRYPHLWVRLYVLELYCIILGLPPCLNIL
RRKQPQLTFFTIALQSCHYQRLPPHILWATGLKSGGSSGGSSGSETPGTSESATPE
SSGGSSGGSDKKYSIGLAIGTNSVGWAVITDEYKVPSKKFKVLGNTDRHSIKKNLIG
ALLFDSGETAEATRLKRTARRRYTRRKNRICYLQEIFSNEMAKVDDSFFHRLEESFL
VEEDKKHERHPIFGNIVDEVAYHEKYPTIYHLRKKLVDSTDKADLRLIYLALAHMIKFR
GHFLIEGDLNPDNSDVDKLFIQLVQTYNQLFEENPINASGVDAKAILSARLSKSRRLE
NLIAQLPGEKKNGLFGNLIALSLGLTPNFKSNFDLAEDAKLQLSKDTYDDDLDNLLAQ
IGDQYADLFLAAKNLSDAILLSDILRVNTEITKAPLSASMIKRYDEHHQDLTLLKALVR
QQLPEKYKEIFFDQSKNGYAGYIDGGASQEEFYKFIKPILEKMDGTEELLVKLNREDL
LRKQRTFDNGSIPHQIHLGELHAILRRQEDFYPFLKDNREKIEKILTFRIPYYVGPLAR
GNSRFAWMTRKSEETITPWNFEEWDKGASAQSFIERMTNFDKNLPNEKVLPKHSL
LYEYFTVYNELTKVKYVTEGMRKPAFLSGEQKKAIVDLLFKTNRKVTVKQLKEDYFK
KIECFDSVEISGVEDRFNASLGTYHDLLKIIKDKDFLDNEENEDILEDIVLTLTLFEDRE
MIEERLKTYAHLFDDKVMKQLKRRRYTGWGRLSRKLINGIRDKQSGKTILDFLKSDG
FANRNFMQLIHDDSLTFKEDIQKAQVSGQGDSLHEHIANLAGSPAIKKGILQTVKVVD
ELVKVMGRHKPENIVIEMARENQTTQKGQKNSRERMKRIEEGIKELGSQILKEHPVE
NTQLQNEKLYLYYLQNGRDMYVDQELDINRLSDYDVDHIVPQSFLKDDSIDNKVLTR
SDKNRGKSDNVPSEEVVKKMKNYWRQLLNAKLITQRKFDNLTKAERGGLSELDKA
GFIKRQLVETRQITKHVAQILDSRMNTKYDENDKLIREVKVITLKSKLVSDFRKDFQF
YKVREINNYHHAHDAYLNAVVGTALIKKYPKLESEFVYGDYKVYDVRKMIAKSEQEI
GKATAKYFFYSNIMNFFKTEITLANGEIRKRPLIETNGETGEIVWDKGRDFATVRKVL
SMPQVNIVKKTEVQTGGFSKESILPKRNSDKLIARKKDWDPKKYGGFDSPTVAYSV
LVVAKVEKGKSKKLKSVKELLGITIMERSSFEKNPIDFLEAKGYKEVKKDLIIKLPKYSL
FELENGRKRMLASAGELQKGNELALPSKYVNFLYLASHYEKLKGSPEDNEQKQLFV
EQHKHYLDEIIEQISEFSKRVILADANLDKVLSAYNKHRDKPIREQAENIIHLFTLTNLG
APAAFKYFDTTIDRKRYTSTKEVLDATLIHQSITGLYETRIDLSQLGGDSGGSKRTAD
GSEFEPKKKRKVGGGGSGATNFSLLKQAGDVEENPGPMVSKGEELFTGWPILVEL
DGDVNGHKFSVSGEGEGDATYGKLTLKFICTTGKLPVPWPTLVTTLTYGVQCFSRY
PDHMKQHDFFKSAMPEGYVQERTIFFKDDGNYKTRAEVKFEGDTLVNRIELKGIDF
KEDGNILGHKLEYNYNSHNVYIMADKQKNGIKVNFKIRHNIEDGSVQLADHYQQNTP
IGDGPVLLPDNHYLSTQSALSKDPNEKRDHMVLLEFVTAAGITLGMDELYK
eUNG-BE4max(R33A)-ΔUGI = CGBE1, SEQ ID NO: 152
MKRTADGSEFESPKKKRKVANELTWHDVLAEEKQQPYFLNTLQTVASERQSGVTIY
PPQKDVFNAFRFTELGDVKVVILGQDPYHGPGQAHGLAFSVRPGIAIPPSLLNMYKE
LENTIPGFTRPNHGYLESWARQGVLLLNTVLTVRAGQAHSHASLGWETFTDKVISLI
NQHREGVVFLLWGSHAQKKGAIIDKQRHHVLKAPHPSPLSAHRGFFGCNHFVLAN
QWLEQRGETPIDWMPVLPAESESGGSGGSGGSSSETGPVAVDPTLRRRIEPHEFE
VFFDPRELAKETCLLYEINWGGRHSIWRHTSQNTNKHVEVNFIEKFTTERYFCPNTR
CSITWFLSWSPCGECSRAITEFLSRYPHVTLFIYIARLYHHADPRNRQGLRDLISSGV
TIQIMTEQESGYCWRNFVNYSPSNEAHWPRYPHLWVRLYVLELYCIILGLPPCLNIL
RRKQPQLTFFTIALQSCHYQRLPPHILWATGLKSGGSSGGSSGSETPGTSESATPE
SSGGSSGGSDKKYSIGLAIGTNSVGWAVITDEYKVPSKKFKVLGNTDRHSIKKNLIG
ALLFDSGETAEATRLKRTARRRYTRRKNRICYLQEIFSNEMAKVDDSFFHRLEESFL
VEEDKKHERHPIFGNIVDEVAYHEKYPTIYHLRKKLVDSTDKADLRLIYLALAHMIKFR
GHFLIEGDLNPDNSDVDKLFIQLVQTYNQLFEENPINASGVDAKAILSARLSKSRRLE
NLIAQLPGEKKNGLFGNLIALSLGLTPNFKSNFDLAEDAKLQLSKDTYDDDLDNLLAQ
IGDQYADLFLAAKNLSDAILLSDILRVNTEITKAPLSASMIKRYDEHHQDLTLLKALVR
QQLPEKYKEIFFDQSKNGYAGYIDGGASQEEFYKFIKPILEKMDGTEELLVKLNREDL
LRKQRTFDNGSIPHQIHLGELHAILRRQEDFYPFLKDNREKIEKILTFRIPYYVGPLAR
GNSRFAWMTRKSEETITPWNFEEWDKGASAQSFIERMTNFDKNLPNEKVLPKHSL
LYEYFTVYNELTKVKYVTEGMRKPAFLSGEQKKAIVDLLFKTNRKVTVKQLKEDYFK
KIECFDSVEISGVEDRFNASLGTYHDLLKIIKDKDFLDNEENEDILEDIVLTLTLFEDRE
MIEERLKTYAHLFDDKVMKQLKRRRYTGWGRLSRKLINGIRDKQSGKTILDFLKSDG
FANRNFMQLIHDDSLTFKEDIQKAQVSGQGDSLHEHIANLAGSPAIKKGILQTVKVVD
ELVKVMGRHKPENIVIEMARENQTTQKGQKNSRERMKRIEEGIKELGSQILKEHPVE
NTQLQNEKLYLYYLQNGRDMYVDQELDINRLSDYDVDHIVPQSFLKDDSIDNKVLTR
SDKNRGKSDNVPSEEVVKKMKNYWRQLLNAKLITQRKFDNLTKAERGGLSELDKA
GFIKRQLVETRQITKHVAQILDSRMNTKYDENDKLIREVKVITLKSKLVSDFRKDFQF
YKVREINNYHHAHDAYLNAVVGTALIKKYPKLESEFVYGDYKVYDVRKMIAKSEQEI
GKATAKYFFYSNIMNFFKTEITLANGEIRKRPLIETNGETGEIVWDKGRDFATVRKVL
SMPQVNIVKKTEVQTGGFSKESILPKRNSDKLIARKKDWDPKKYGGFDSPTVAYSV
LVVAKVEKGKSKKLKSVKELLGITIMERSSFEKNPIDFLEAKGYKEVKKDLIIKLPKYSL
FELENGRKRMLASAGELQKGNELALPSKYVNFLYLASHYEKLKGSPEDNEQKQLFV
EQHKHYLDEIIEQISEFSKRVILADANLDKVLSAYNKHRDKPIREQAENIIHLFTLTNLG
APAAFKYFDTTIDRKRYTSTKEVLDATLIHQSITGLYETRIDLSQLGGDSGGSKRTAD
GSEFEPKKKRKVGGGGSGATNFSLLKQAGDVEENPGPMVSKGEELFTGWPILVEL
DGDVNGHKFSVSGEGEGDATYGKLTLKFICTTGKLPVPWPTLVTTLTYGVQCFSRY
PDHMKQHDFFKSAMPEGYVQERTIFFKDDGNYKTRAEVKFEGDTLVNRIELKGIDF
KEDGNILGHKLEYNYNSHNVYIMADKQKNGIKVNFKIRHNIEDGSVQLADHYQQNTP
IGDGPVLLPDNHYLSTQSALSKDPNEKRDHMVLLEFVTAAGITLGMDELYK
eUNG-BE4max(R33A/K34A)-ΔUGI, SEQ ID NO: 153
MKRTADGSEFESPKKKRKVANELTWHDVLAEEKQQPYFLNTLQTVASERQSGVTIY
PPQKDVFNAFRFTELGDVKVVILGQDPYHGPGQAHGLAFSVRPGIAIPPSLLNMYKE
LENTIPGFTRPNHGYLESWARQGVLLLNTVLTVRAGQAHSHASLGWETFTDKVISLI
NQHREGVVFLLWGSHAQKKGAIIDKQRHHVLKAPHPSPLSAHRGFFGCNHFVLAN
QWLEQRGETPIDWMPVLPAESESGGSGGSGGSSSETGPVAVDPTLRRRIEPHEFE
VFFDPRELAAETCLLYEINWGGRHSIWRHTSQNTNKHVEVNFIEKFTTERYFCPNTR
CSITWFLSWSPCGECSRAITEFLSRYPHVTLFIYIARLYHHADPRNRQGLRDLISSGV
TIQIMTEQESGYCWRNFVNYSPSNEAHWPRYPHLWVRLYVLELYCIILGLPPCLNIL
RRKQPQLTFFTIALQSCHYQRLPPHILWATGLKSGGSSGGSSGSETPGTSESATPE
SSGGSSGGSDKKYSIGLAIGTNSVGWAVITDEYKVPSKKFKVLGNTDRHSIKKNLIG
ALLFDSGETAEATRLKRTARRRYTRRKNRICYLQEIFSNEMAKVDDSFFHRLEESFL
VEEDKKHERHPIFGNIVDEVAYHEKYPTIYHLRKKLVDSTDKADLRLIYLALAHMIKFR
GHFLIEGDLNPDNSDVDKLFIQLVQTYNQLFEENPINASGVDAKAILSARLSKSRRLE
NLIAQLPGEKKNGLFGNLIALSLGLTPNFKSNFDLAEDAKLQLSKDTYDDDLDNLLAQ
IGDQYADLFLAAKNLSDAILLSDILRVNTEITKAPLSASMIKRYDEHHQDLTLLKALVR
QQLPEKYKEIFFDQSKNGYAGYIDGGASQEEFYKFIKPILEKMDGTEELLVKLNREDL
LRKQRTFDNGSIPHQIHLGELHAILRRQEDFYPFLKDNREKIEKILTFRIPYYVGPLAR
GNSRFAWMTRKSEETITPWNFEEWDKGASAQSFIERMTNFDKNLPNEKVLPKHSL
LYEYFTVYNELTKVKYVTEGMRKPAFLSGEQKKAIVDLLFKTNRKVTVKQLKEDYFK
KIECFDSVEISGVEDRFNASLGTYHDLLKIIKDKDFLDNEENEDILEDIVLTLTLFEDRE
MIEERLKTYAHLFDDKVMKQLKRRRYTGWGRLSRKLINGIRDKQSGKTILDFLKSDG
FANRNFMQLIHDDSLTFKEDIQKAQVSGQGDSLHEHIANLAGSPAIKKGILQTVKVVD
ELVKVMGRHKPENIVIEMARENQTTQKGQKNSRERMKRIEEGIKELGSQILKEHPVE
NTQLQNEKLYLYYLQNGRDMYVDQELDINRLSDYDVDHIVPQSFLKDDSIDNKVLTR
SDKNRGKSDNVPSEEVVKKMKNYWRQLLNAKLITQRKFDNLTKAERGGLSELDKA
GFIKRQLVETRQITKHVAQILDSRMNTKYDENDKLIREVKVITLKSKLVSDFRKDFQF
YKVREINNYHHAHDAYLNAVVGTALIKKYPKLESEFVYGDYKVYDVRKMIAKSEQEI
GKATAKYFFYSNIMNFFKTEITLANGEIRKRPLIETNGETGEIVWDKGRDFATVRKVL
SMPQVNIVKKTEVQTGGFSKESILPKRNSDKLIARKKDWDPKKYGGFDSPTVAYSV
LVVAKVEKGKSKKLKSVKELLGITIMERSSFEKNPIDFLEAKGYKEVKKDLIIKLPKYSL
FELENGRKRMLASAGELQKGNELALPSKYVNFLYLASHYEKLKGSPEDNEQKQLFV
EQHKHYLDEIIEQISEFSKRVILADANLDKVLSAYNKHRDKPIREQAENIIHLFTLTNLG
APAAFKYFDTTIDRKRYTSTKEVLDATLIHQSITGLYETRIDLSQLGGDSGGSKRTAD
GSEFEPKKKRKVGGGGSGATNFSLLKQAGDVEENPGPMVSKGEELFTGWPILVEL
DGDVNGHKFSVSGEGEGDATYGKLTLKFICTTGKLPVPWPTLVTTLTYGVQCFSRY
PDHMKQHDFFKSAMPEGYVQERTIFFKDDGNYKTRAEVKFEGDTLVNRIELKGIDF
KEDGNILGHKLEYNYNSHNVYIMADKQKNGIKVNFKIRHNIEDGSVQLADHYQQNTP
IGDGPVLLPDNHYLSTQSALSKDPNEKRDHMVLLEFVTAAGITLGMDELYK
eUNG-nCas9 for BE4max, SEQ ID NO: 154
MKRTADGSEFESPKKKRKVANELTWHDVLAEEKQQPYFLNTLQTVASERQSGVTIY
PPQKDVFNAFRFTELGDVKVVILGQDPYHGPGQAHGLAFSVRPGIAIPPSLLNMYKE
LENTIPGFTRPNHGYLESWARQGVLLLNTVLTVRAGQAHSHASLGWETFTDKVISLI
NQHREGVVFLLWGSHAQKKGAIIDKQRHHVLKAPHPSPLSAHRGFFGCNHFVLAN
QWLEQRGETPIDWMPVLPAESESGGSGGSGGSSGGSSGGSSGSETPGTSESATP
ESSGGSSGGSDKKYSIGLAIGTNSVGWAVITDEYKVPSKKFKVLGNTDRHSIKKNLI
GALLFDSGETAEATRLKRTARRRYTRRKNRICYLQEIFSNEMAKVDDSFFHRLEESF
LVEEDKKHERHPIFGNIVDEVAYHEKYPTIYHLRKKLVDSTDKADLRLIYLALAHMIKF
RGHFLIEGDLNPDNSDVDKLFIQLVQTYNQLFEENPINASGVDAKAILSARLSKSRRL
ENLIAQLPGEKKNGLFGNLIALSLGLTPNFKSNFDLAEDAKLQLSKDTYDDDLDNLLA
QIGDQYADLFLAAKNLSDAILLSDILRVNTEITKAPLSASMIKRYDEHHQDLTLLKALV
RQQLPEKYKEIFFDQSKNGYAGYIDGGASQEEFYKFIKPILEKMDGTEELLVKLNRE
DLLRKQRTFDNGSIPHQIHLGELHAILRRQEDFYPFLKDNREKIEKILTFRIPYYVGPL
ARGNSRFAWMTRKSEETITPWNFEEVVDKGASAQSFIERMTNFDKNLPNEKVLPK
HSLLYEYFTVYNELTKVKYVTEGMRKPAFLSGEQKKAIVDLLFKTNRKVTVKQLKED
YFKKIECFDSVEISGVEDRFNASLGTYHDLLKIIKDKDFLDNEENEDILEDIVLTLTLFE
DREMIEERLKTYAHLFDDKVMKQLKRRRYTGWGRLSRKLINGIRDKQSGKTILDFLK
SDGFANRNFMQLIHDDSLTFKEDIQKAQVSGQGDSLHEHIANLAGSPAIKKGILQTV
KWDELVKVMGRHKPENIVIEMARENQTTQKGQKNSRERMKRIEEGIKELGSQILKE
HPVENTQLQNEKLYLYYLQNGRDMYVDQELDINRLSDYDVDHIVPQSFLKDDSIDN
KVLTRSDKNRGKSDNVPSEEVVKKMKNYWRQLLNAKLITQRKFDNLTKAERGGLS
ELDKAGFIKRQLVETRQITKHVAQILDSRMNTKYDENDKLIREVKVITLKSKLVSDFRK
DFQFYKVREINNYHHAHDAYLNAVVGTALIKKYPKLESEFVYGDYKVYDVRKMIAKS
EQEIGKATAKYFFYSNIMNFFKTEITLANGEIRKRPLIETNGETGEIVWDKGRDFATV
RKVLSMPQVNIVKKTEVQTGGFSKESILPKRNSDKLIARKKDWDPKKYGGFDSPTV
AYSVLVVAKVEKGKSKKLKSVKELLGITIMERSSFEKNPIDFLEAKGYKEVKKDLIIKL
PKYSLFELENGRKRMLASAGELQKGNELALPSKYVNFLYLASHYEKLKGSPEDNEQ
KQLFVEQHKHYLDEIIEQISEFSKRVILADANLDKVLSAYNKHRDKPIREQAENIIHLFT
LTNLGAPAAFKYFDTTIDRKRYTSTKEVLDATLIHQSITGLYETRIDLSQLGGDSGGS
KRTADGSEFEPKKKRKVGGGGSGATNFSLLKQAGDVEENPGPMVSKGEELFTGVV
PILVELDGDVNGHKFSVSGEGEGDATYGKLTLKFICTTGKLPVPWPTLVTTLTYGVQ
CFSRYPDHMKQHDFFKSAMPEGYVQERTIFFKDDGNYKTRAEVKFEGDTLVNRIEL
KGIDFKEDGNILGHKLEYNYNSHNVYIMADKQKNGIKVNFKIRHNIEDGSVQLADHY
QQNTPIGDGPVLLPDNHYLSTQSALSKDPNEKRDHMVLLEFVTAAGITLGMDELYK
BE4max-ΔUGI-hUNG, SEQ ID NO: 155
MKRTADGSEFESPKKKRKVSSETGPVAVDPTLRRRIEPHEFEVFFDPRELRKETCL
LYEINWGGRHSIWRHTSQNTNKHVEVNFIEKFTTERYFCPNTRCSITWFLSWSPCG
ECSRAITEFLSRYPHVTLFIYIARLYHHADPRNRQGLRDLISSGVTIQIMTEQESGYC
WRNFVNYSPSNEAHWPRYPHLWVRLYVLELYCIILGLPPCLNILRRKQPQLTFFTIAL
QSCHYQRLPPHILWATGLKSGGSSGGSSGSETPGTSESATPESSGGSSGGSDKKY
SIGLAIGTNSVGWAVITDEYKVPSKKFKVLGNTDRHSIKKNLIGALLFDSGETAEATR
LKRTARRRYTRRKNRICYLQEIFSNEMAKVDDSFFHRLEESFLVEEDKKHERHPIFG
NIVDEVAYHEKYPTIYHLRKKLVDSTDKADLRLIYLALAHMIKFRGHFLIEGDLNPDNS
DVDKLFIQLVQTYNQLFEENPINASGVDAKAILSARLSKSRRLENLIAQLPGEKKNGL
FGNLIALSLGLTPNFKSNFDLAEDAKLQLSKDTYDDDLDNLLAQIGDQYADLFLAAKN
LSDAILLSDILRVNTEITKAPLSASMIKRYDEHHQDLTLLKALVRQQLPEKYKEIFFDQ
SKNGYAGYIDGGASQEEFYKFIKPILEKMDGTEELLVKLNREDLLRKQRTFDNGSIP
HQIHLGELHAILRRQEDFYPFLKDNREKIEKILTFRIPYYVGPLARGNSRFAWMTRKS
EETITPWNFEEVVDKGASAQSFIERMTNFDKNLPNEKVLPKHSLLYEYFTVYNELTK
VKYVTEGMRKPAFLSGEQKKAIVDLLFKTNRKVTVKQLKEDYFKKIECFDSVEISGV
EDRFNASLGTYHDLLKIIKDKDFLDNEENEDILEDIVLTLTLFEDREMIEERLKTYAHLF
DDKVMKQLKRRRYTGWGRLSRKLINGIRDKQSGKTILDFLKSDGFANRNFMQLIHD
DSLTFKEDIQKAQVSGQGDSLHEHIANLAGSPAIKKGILQTVKVVDELVKVMGRHKP
ENIVIEMARENQTTQKGQKNSRERMKRIEEGIKELGSQILKEHPVENTQLQNEKLYL
YYLQNGRDMYVDQELDINRLSDYDVDHIVPQSFLKDDSIDNKVLTRSDKNRGKSDN
VPSEEVVKKMKNYWRQLLNAKLITQRKFDNLTKAERGGLSELDKAGFIKRQLVETR
QITKHVAQILDSRMNTKYDENDKLIREVKVITLKSKLVSDFRKDFQFYKVREINNYHH
AHDAYLNAVVGTALIKKYPKLESEFVYGDYKVYDVRKMIAKSEQEIGKATAKYFFYS
NIMNFFKTEITLANGEIRKRPLIETNGETGEIVWDKGRDFATVRKVLSMPQVNIVKKT
EVQTGGFSKESILPKRNSDKLIARKKDWDPKKYGGFDSPTVAYSVLVVAKVEKGKS
KKLKSVKELLGITIMERSSFEKNPIDFLEAKGYKEVKKDLIIKLPKYSLFELENGRKRM
LASAGELQKGNELALPSKYVNFLYLASHYEKLKGSPEDNEQKQLFVEQHKHYLDEII
EQISEFSKRVILADANLDKVLSAYNKHRDKPIREQAENIIHLFTLTNLGAPAAFKYFDT
TIDRKRYTSTKEVLDATLIHQSITGLYETRIDLSQLGGDSGGSGGSGGSIGQKTLYSF
FSPSPARKRHAPSPEPAVQGTGVAGVPEESGDAAAIPAKKAPAGQEEPGTPPSSP
LSAEQLDRIQRNKAAALLRLAARNVPVGFGESWKKHLSGEFGKPYFIKLMGFVAEE
RKHYTVYPPPHQVFTWTQMCDIKDVKVVILGQDPYHGPNQAHGLCFSVQRPVPPP
PSLENIYKELSTDIEDFVHPGHGDLSGWAKQGVLLLNAVLTVRAHQANSHKERGWE
QFTDAVVSWLNQNSNGLVFLLWGSYAQKKGSAIDRKRHHVLQTAHPSPLSVYRGF
FGCRHFSKTNELLQKSGKKPIDWKELSGGSKRTADGSEFEPKKKRKVGGGGSGAT
NFSLLKQAGDVEENPGPMVSKGEELFTGVVPILVELDGDVNGHKFSVSGEGEGDA
TYGKLTLKFICTTGKLPVPWPTLVTTLTYGVQCFSRYPDHMKQHDFFKSAMPEGYV
QERTIFFKDDGNYKTRAEVKFEGDTLVNRIELKGIDFKEDGNILGHKLEYNYNSHNV
YIMADKQKNGIKVNFKIRHNIEDGSVQLADHYQQNTPIGDGPVLLPDNHYLSTQSAL
SKDPNEKRDHMVLLEFVTAAGITLGMDELYK
BE4max(R33A)-ΔUGI-hUNG, SEQ ID NO: 156
MKRTADGSEFESPKKKRKVSSETGPVAVDPTLRRRIEPHEFEVFFDPRELAKETCLL
YEINWGGRHSIWRHTSQNTNKHVEVNFIEKFTTERYFCPNTRCSITWFLSWSPCGE
CSRAITEFLSRYPHVTLFIYIARLYHHADPRNRQGLRDLISSGVTIQIMTEQESGYCW
RNFVNYSPSNEAHWPRYPHLWVRLYVLELYCIILGLPPCLNILRRKQPQLTFFTIALQ
SCHYQRLPPHILWATGLKSGGSSGGSSGSETPGTSESATPESSGGSSGGSDKKYS
IGLAIGTNSVGWAVITDEYKVPSKKFKVLGNTDRHSIKKNLIGALLFDSGETAEATRL
KRTARRRYTRRKNRICYLQEIFSNEMAKVDDSFFHRLEESFLVEEDKKHERHPIFGN
IVDEVAYHEKYPTIYHLRKKLVDSTDKADLRLIYLALAHMIKFRGHFLIEGDLNPDNSD
VDKLFIQLVQTYNQLFEENPINASGVDAKAILSARLSKSRRLENLIAQLPGEKKNGLF
GNLIALSLGLTPNFKSNFDLAEDAKLQLSKDTYDDDLDNLLAQIGDQYADLFLAAKNL
SDAILLSDILRVNTEITKAPLSASMIKRYDEHHQDLTLLKALVRQQLPEKYKEIFFDQS
KNGYAGYIDGGASQEEFYKFIKPILEKMDGTEELLVKLNREDLLRKQRTFDNGSIPH
QIHLGELHAILRRQEDFYPFLKDNREKIEKILTFRIPYYVGPLARGNSRFAWMTRKSE
ETITPWNFEEVVDKGASAQSFIERMTNFDKNLPNEKVLPKHSLLYEYFTVYNELTKV
KYVTEGMRKPAFLSGEQKKAIVDLLFKTNRKVTVKQLKEDYFKKIECFDSVEISGVE
DRFNASLGTYHDLLKIIKDKDFLDNEENEDILEDIVLTLTLFEDREMIEERLKTYAHLFD
DKVMKQLKRRRYTGWGRLSRKLINGIRDKQSGKTILDFLKSDGFANRNFMQLIHDD
SLTFKEDIQKAQVSGQGDSLHEHIANLAGSPAIKKGILQTVKVVDELVKVMGRHKPE
NIVIEMARENQTTQKGQKNSRERMKRIEEGIKELGSQILKEHPVENTQLQNEKLYLY
YLQNGRDMYVDQELDINRLSDYDVDHIVPQSFLKDDSIDNKVLTRSDKNRGKSDNV
PSEEVVKKMKNYWRQLLNAKLITQRKFDNLTKAERGGLSELDKAGFIKRQLVETRQI
TKHVAQILDSRMNTKYDENDKLIREVKVITLKSKLVSDFRKDFQFYKVREINNYHHAH
DAYLNAVVGTALIKKYPKLESEFVYGDYKVYDVRKMIAKSEQEIGKATAKYFFYSNIM
NFFKTEITLANGEIRKRPLIETNGETGEIVWDKGRDFATVRKVLSMPQVNIVKKTEVQ
TGGFSKESILPKRNSDKLIARKKDWDPKKYGGFDSPTVAYSVLVVAKVEKGKSKKL
KSVKELLGITIMERSSFEKNPIDFLEAKGYKEVKKDLIIKLPKYSLFELENGRKRMLAS
AGELQKGNELALPSKYVNFLYLASHYEKLKGSPEDNEQKQLFVEQHKHYLDEIIEQI
SEFSKRVILADANLDKVLSAYNKHRDKPIREQAENIIHLFTLTNLGAPAAFKYFDTTID
RKRYTSTKEVLDATLIHQSITGLYETRIDLSQLGGDSGGSGGSGGSIGQKTLYSFFS
PSPARKRHAPSPEPAVQGTGVAGVPEESGDAAAIPAKKAPAGQEEPGTPPSSPLS
AEQLDRIQRNKAAALLRLAARNVPVGFGESWKKHLSGEFGKPYFIKLMGFVAEERK
HYTVYPPPHQVFTWTQMCDIKDVKVVILGQDPYHGPNQAHGLCFSVQRPVPPPPS
LENIYKELSTDIEDFVHPGHGDLSGWAKQGVLLLNAVLTVRAHQANSHKERGWEQF
TDAVVSWLNQNSNGLVFLLWGSYAQKKGSAIDRKRHHVLQTAHPSPLSVYRGFFG
CRHFSKTNELLQKSGKKPIDWKELSGGSKRTADGSEFEPKKKRKVGGGGSGATNF
SLLKQAGDVEENPGPMVSKGEELFTGVVPILVELDGDVNGHKFSVSGEGEGDATY
GKLTLKFICTTGKLPVPWPTLVTTLTYGVQCFSRYPDHMKQHDFFKSAMPEGYVQE
RTIFFKDDGNYKTRAEVKFEGDTLVNRIELKGIDFKEDGNILGHKLEYNYNSHNVYIM
ADKQKNGIKVNFKIRHNIEDGSVQLADHYQQNTPIGDGPVLLPDNHYLSTQSALSKD
PNEKRDHMVLLEFVTAAGITLGMDELYK
BE4max(R33A/K34A)-ΔUGI-hUNG, SEQ ID NO: 157
MKRTADGSEFESPKKKRKVSSETGPVAVDPTLRRRIEPHEFEVFFDPRELAAETCLL
YEINWGGRHSIWRHTSQNTNKHVEVNFIEKFTTERYFCPNTRCSITWFLSWSPCGE
CSRAITEFLSRYPHVTLFIYIARLYHHADPRNRQGLRDLISSGVTIQIMTEQESGYCW
RNFVNYSPSNEAHWPRYPHLWVRLYVLELYCIILGLPPCLNILRRKQPQLTFFTIALQ
SCHYQRLPPHILWATGLKSGGSSGGSSGSETPGTSESATPESSGGSSGGSDKKYS
IGLAIGTNSVGWAVITDEYKVPSKKFKVLGNTDRHSIKKNLIGALLFDSGETAEATRL
KRTARRRYTRRKNRICYLQEIFSNEMAKVDDSFFHRLEESFLVEEDKKHERHPIFGN
IVDEVAYHEKYPTIYHLRKKLVDSTDKADLRLIYLALAHMIKFRGHFLIEGDLNPDNSD
VDKLFIQLVQTYNQLFEENPINASGVDAKAILSARLSKSRRLENLIAQLPGEKKNGLF
GNLIALSLGLTPNFKSNFDLAEDAKLQLSKDTYDDDLDNLLAQIGDQYADLFLAAKNL
SDAILLSDILRVNTEITKAPLSASMIKRYDEHHQDLTLLKALVRQQLPEKYKEIFFDQS
KNGYAGYIDGGASQEEFYKFIKPILEKMDGTEELLVKLNREDLLRKQRTFDNGSIPH
QIHLGELHAILRRQEDFYPFLKDNREKIEKILTFRIPYYVGPLARGNSRFAWMTRKSE
ETITPWNFEEVVDKGASAQSFIERMTNFDKNLPNEKVLPKHSLLYEYFTVYNELTKV
KYVTEGMRKPAFLSGEQKKAIVDLLFKTNRKVTVKQLKEDYFKKIECFDSVEISGVE
DRFNASLGTYHDLLKIIKDKDFLDNEENEDILEDIVLTLTLFEDREMIEERLKTYAHLFD
DKVMKQLKRRRYTGWGRLSRKLINGIRDKQSGKTILDFLKSDGFANRNFMQLIHDD
SLTFKEDIQKAQVSGQGDSLHEHIANLAGSPAIKKGILQTVKVVDELVKVMGRHKPE
NIVIEMARENQTTQKGQKNSRERMKRIEEGIKELGSQILKEHPVENTQLQNEKLYLY
YLQNGRDMYVDQELDINRLSDYDVDHIVPQSFLKDDSIDNKVLTRSDKNRGKSDNV
PSEEVVKKMKNYWRQLLNAKLITQRKFDNLTKAERGGLSELDKAGFIKRQLVETRQI
TKHVAQILDSRMNTKYDENDKLIREVKVITLKSKLVSDFRKDFQFYKVREINNYHHAH
DAYLNAVVGTALIKKYPKLESEFVYGDYKVYDVRKMIAKSEQEIGKATAKYFFYSNIM
NFFKTEITLANGEIRKRPLIETNGETGEIVWDKGRDFATVRKVLSMPQVNIVKKTEVQ
TGGFSKESILPKRNSDKLIARKKDWDPKKYGGFDSPTVAYSVLVVAKVEKGKSKKL
KSVKELLGITIMERSSFEKNPIDFLEAKGYKEVKKDLIIKLPKYSLFELENGRKRMLAS
AGELQKGNELALPSKYVNFLYLASHYEKLKGSPEDNEQKQLFVEQHKHYLDEIIEQI
SEFSKRVILADANLDKVLSAYNKHRDKPIREQAENIIHLFTLTNLGAPAAFKYFDTTID
RKRYTSTKEVLDATLIHQSITGLYETRIDLSQLGGDSGGSGGSGGSIGQKTLYSFFS
PSPARKRHAPSPEPAVQGTGVAGVPEESGDAAAIPAKKAPAGQEEPGTPPSSPLS
AEQLDRIQRNKAAALLRLAARNVPVGFGESWKKHLSGEFGKPYFIKLMGFVAEERK
HYTVYPPPHQVFTWTQMCDIKDVKVVILGQDPYHGPNQAHGLCFSVQRPVPPPPS
LENIYKELSTDIEDFVHPGHGDLSGWAKQGVLLLNAVLTVRAHQANSHKERGWEQF
TDAVVSWLNQNSNGLVFLLWGSYAQKKGSAIDRKRHHVLQTAHPSPLSVYRGFFG
CRHFSKTNELLQKSGKKPIDWKELSGGSKRTADGSEFEPKKKRKVGGGGSGATNF
SLLKQAGDVEENPGPMVSKGEELFTGVVPILVELDGDVNGHKFSVSGEGEGDATY
GKLTLKFICTTGKLPVPWPTLVTTLTYGVQCFSRYPDHMKQHDFFKSAMPEGYVQE
RTIFFKDDGNYKTRAEVKFEGDTLVNRIELKGIDFKEDGNILGHKLEYNYNSHNVYIM
ADKQKNGIKVNFKIRHNIEDGSVQLADHYQQNTPIGDGPVLLPDNHYLSTQSALSKD
PNEKRDHMVLLEFVTAAGITLGMDELYK
nCas9-hUNG for BE4max, SEQ ID NO: 158
MKRTADGSEFESPKKKRKVSGGSSGGSSGSETPGTSESATPESSGGSSGGSDKK
YSIGLAIGTNSVGWAVITDEYKVPSKKFKVLGNTDRHSIKKNLIGALLFDSGETAEAT
RLKRTARRRYTRRKNRICYLQEIFSNEMAKVDDSFFHRLEESFLVEEDKKHERHPIF
GNIVDEVAYHEKYPTIYHLRKKLVDSTDKADLRLIYLALAHMIKFRGHFLIEGDLNPDN
SDVDKLFIQLVQTYNQLFEENPINASGVDAKAILSARLSKSRRLENLIAQLPGEKKNG
LFGNLIALSLGLTPNFKSNFDLAEDAKLQLSKDTYDDDLDNLLAQIGDQYADLFLAAK
NLSDAILLSDILRVNTEITKAPLSASMIKRYDEHHQDLTLLKALVRQQLPEKYKEIFFD
QSKNGYAGYIDGGASQEEFYKFIKPILEKMDGTEELLVKLNREDLLRKQRTFDNGSI
PHQIHLGELHAILRRQEDFYPFLKDNREKIEKILTFRIPYYVGPLARGNSRFAWMTRK
SEETITPWNFEEVVDKGASAQSFIERMTNFDKNLPNEKVLPKHSLLYEYFTVYNELT
KVKYVTEGMRKPAFLSGEQKKAIVDLLFKTNRKVTVKQLKEDYFKKIECFDSVEISG
VEDRFNASLGTYHDLLKIIKDKDFLDNEENEDILEDIVLTLTLFEDREMIEERLKTYAHL
FDDKVMKQLKRRRYTGWGRLSRKLINGIRDKQSGKTILDFLKSDGFANRNFMQLIH
DDSLTFKEDIQKAQVSGQGDSLHEHIANLAGSPAIKKGILQTVKVVDELVKVMGRHK
PENIVIEMARENQTTQKGQKNSRERMKRIEEGIKELGSQILKEHPVENTQLQNEKLY
LYYLQNGRDMYVDQELDINRLSDYDVDHIVPQSFLKDDSIDNKVLTRSDKNRGKSD
NVPSEEVVKKMKNYWRQLLNAKLITQRKFDNLTKAERGGLSELDKAGFIKRQLVET
RQITKHVAQILDSRMNTKYDENDKLIREVKVITLKSKLVSDFRKDFQFYKVREINNYH
HAHDAYLNAVVGTALIKKYPKLESEFVYGDYKVYDVRKMIAKSEQEIGKATAKYFFY
SNIMNFFKTEITLANGEIRKRPLIETNGETGEIVWDKGRDFATVRKVLSMPQVNIVKK
TEVQTGGFSKESILPKRNSDKLIARKKDWDPKKYGGFDSPTVAYSVLVVAKVEKGK
SKKLKSVKELLGITIMERSSFEKNPIDFLEAKGYKEVKKDLIIKLPKYSLFELENGRKR
MLASAGELQKGNELALPSKYVNFLYLASHYEKLKGSPEDNEQKQLFVEQHKHYLDE
IIEQISEFSKRVILADANLDKVLSAYNKHRDKPIREQAENIIHLFTLTNLGAPAAFKYFD
TTIDRKRYTSTKEVLDATLIHQSITGLYETRIDLSQLGGDSGGSGGSGGSIGQKTLYS
FFSPSPARKRHAPSPEPAVQGTGVAGVPEESGDAAAIPAKKAPAGQEEPGTPPSS
PLSAEQLDRIQRNKAAALLRLAARNVPVGFGESWKKHLSGEFGKPYFIKLMGFVAE
ERKHYTVYPPPHQVFTWTQMCDIKDVKVVILGQDPYHGPNQAHGLCFSVQRPVPP
PPSLENIYKELSTDIEDFVHPGHGDLSGWAKQGVLLLNAVLTVRAHQANSHKERGW
EQFTDAVVSWLNQNSNGLVFLLWGSYAQKKGSAIDRKRHHVLQTAHPSPLSVYRG
FFGCRHFSKTNELLQKSGKKPIDWKELSGGSKRTADGSEFEPKKKRKVGGGGSGA
TNFSLLKQAGDVEENPGPMVSKGEELFTGVVPILVELDGDVNGHKFSVSGEGEGD
ATYGKLTLKFICTTGKLPVPWPTLVTTLTYGVQCFSRYPDHMKQHDFFKSAMPEGY
VQERTIFFKDDGNYKTRAEVKFEGDTLVNRIELKGIDFKEDGNILGHKLEYNYNSHN
VYIMADKQKNGIKVNFKIRHNIEDGSVQLADHYQQNTPIGDGPVLLPDNHYLSTQSA
LSKDPNEKRDHMVLLEFVTAAGITLGMDELYK
hUNG-BE4max-ΔUGI, SEQ ID NO: 159
MKRTADGSEFESPKKKRKVIGQKTLYSFFSPSPARKRHAPSPEPAVQGTGVAGVP
EESGDAAAIPAKKAPAGQEEPGTPPSSPLSAEQLDRIQRNKAAALLRLAARNVPVG
FGESWKKHLSGEFGKPYFIKLMGFVAEERKHYTVYPPPHQVFTWTQMCDIKDVKV
VILGQDPYHGPNQAHGLCFSVQRPVPPPPSLENIYKELSTDIEDFVHPGHGDLSGW
AKQGVLLLNAVLTVRAHQANSHKERGWEQFTDAVVSWLNQNSNGLVFLLWGSYA
QKKGSAIDRKRHHVLQTAHPSPLSVYRGFFGCRHFSKTNELLQKSGKKPIDWKELS
GGSGGSGGSSSETGPVAVDPTLRRRIEPHEFEVFFDPRELRKETCLLYEINWGGRH
SIWRHTSQNTNKHVEVNFIEKFTTERYFCPNTRCSITWFLSWSPCGECSRAITEFLS
RYPHVTLFIYIARLYHHADPRNRQGLRDLISSGVTIQIMTEQESGYCWRNFVNYSPS
NEAHWPRYPHLWVRLYVLELYCIILGLPPCLNILRRKQPQLTFFTIALQSCHYQRLPP
HILWATGLKSGGSSGGSSGSETPGTSESATPESSGGSSGGSDKKYSIGLAIGTNSV
GWAVITDEYKVPSKKFKVLGNTDRHSIKKNLIGALLFDSGETAEATRLKRTARRRYT
RRKNRICYLQEIFSNEMAKVDDSFFHRLEESFLVEEDKKHERHPIFGNIVDEVAYHE
KYPTIYHLRKKLVDSTDKADLRLIYLALAHMIKFRGHFLIEGDLNPDNSDVDKLFIQLV
QTYNQLFEENPINASGVDAKAILSARLSKSRRLENLIAQLPGEKKNGLFGNLIALSLG
LTPNFKSNFDLAEDAKLQLSKDTYDDDLDNLLAQIGDQYADLFLAAKNLSDAILLSDIL
RVNTEITKAPLSASMIKRYDEHHQDLTLLKALVRQQLPEKYKEIFFDQSKNGYAGYID
GGASQEEFYKFIKPILEKMDGTEELLVKLNREDLLRKQRTFDNGSIPHQIHLGELHAI
LRRQEDFYPFLKDNREKIEKILTFRIPYYVGPLARGNSRFAWMTRKSEETITPWNFE
EVVDKGASAQSFIERMTNFDKNLPNEKVLPKHSLLYEYFTVYNELTKVKYVTEGMR
KPAFLSGEQKKAIVDLLFKTNRKVTVKQLKEDYFKKIECFDSVEISGVEDRFNASLGT
YHDLLKIIKDKDFLDNEENEDILEDIVLTLTLFEDREMIEERLKTYAHLFDDKVMKQLK
RRRYTGWGRLSRKLINGIRDKQSGKTILDFLKSDGFANRNFMQLIHDDSLTFKEDIQ
KAQVSGQGDSLHEHIANLAGSPAIKKGILQTVKVVDELVKVMGRHKPENIVIEMARE
NQTTQKGQKNSRERMKRIEEGIKELGSQILKEHPVENTQLQNEKLYLYYLQNGRDM
YVDQELDINRLSDYDVDHIVPQSFLKDDSIDNKVLTRSDKNRGKSDNVPSEEVVKK
MKNYWRQLLNAKLITQRKFDNLTKAERGGLSELDKAGFIKRQLVETRQITKHVAQIL
DSRMNTKYDENDKLIREVKVITLKSKLVSDFRKDFQFYKVREINNYHHAHDAYLNAV
VGTALIKKYPKLESEFVYGDYKVYDVRKMIAKSEQEIGKATAKYFFYSNIMNFFKTEIT
LANGEIRKRPLIETNGETGEIVWDKGRDFATVRKVLSMPQVNIVKKTEVQTGGFSKE
SILPKRNSDKLIARKKDWDPKKYGGFDSPTVAYSVLVVAKVEKGKSKKLKSVKELLG
ITIMERSSFEKNPIDFLEAKGYKEVKKDLIIKLPKYSLFELENGRKRMLASAGELQKGN
ELALPSKYVNFLYLASHYEKLKGSPEDNEQKQLFVEQHKHYLDEIIEQISEFSKRVILA
DANLDKVLSAYNKHRDKPIREQAENIIHLFTLTNLGAPAAFKYFDTTIDRKRYTSTKE
VLDATLIHQSITGLYETRIDLSQLGGDSGGSKRTADGSEFEPKKKRKVGGGGSGAT
NFSLLKQAGDVEENPGPMVSKGEELFTGVVPILVELDGDVNGHKFSVSGEGEGDA
TYGKLTLKFICTTGKLPVPWPTLVTTLTYGVQCFSRYPDHMKQHDFFKSAMPEGYV
QERTIFFKDDGNYKTRAEVKFEGDTLVNRIELKGIDFKEDGNILGHKLEYNYNSHNV
YIMADKQKNGIKVNFKIRHNIEDGSVQLADHYQQNTPIGDGPVLLPDNHYLSTQSAL
SKDPNEKRDHMVLLEFVTAAGITLGMDELYK
hUNG-BE4max(R33A)-ΔUGI, SEQ ID NO: 160
MKRTADGSEFESPKKKRKVIGQKTLYSFFSPSPARKRHAPSPEPAVQGTGVAGVP
EESGDAAAIPAKKAPAGQEEPGTPPSSPLSAEQLDRIQRNKAAALLRLAARNVPVG
FGESWKKHLSGEFGKPYFIKLMGFVAEERKHYTVYPPPHQVFTWTQMCDIKDVKV
VILGQDPYHGPNQAHGLCFSVQRPVPPPPSLENIYKELSTDIEDFVHPGHGDLSGW
AKQGVLLLNAVLTVRAHQANSHKERGWEQFTDAVVSWLNQNSNGLVFLLWGSYA
QKKGSAIDRKRHHVLQTAHPSPLSVYRGFFGCRHFSKTNELLQKSGKKPIDWKELS
GGSGGSGGSSSETGPVAVDPTLRRRIEPHEFEVFFDPRELAKETCLLYEINWGGRH
SIWRHTSQNTNKHVEVNFIEKFTTERYFCPNTRCSITWFLSWSPCGECSRAITEFLS
RYPHVTLFIYIARLYHHADPRNRQGLRDLISSGVTIQIMTEQESGYCWRNFVNYSPS
NEAHWPRYPHLWVRLYVLELYCIILGLPPCLNILRRKQPQLTFFTIALQSCHYQRLPP
HILWATGLKSGGSSGGSSGSETPGTSESATPESSGGSSGGSDKKYSIGLAIGTNSV
GWAVITDEYKVPSKKFKVLGNTDRHSIKKNLIGALLFDSGETAEATRLKRTARRRYT
RRKNRICYLQEIFSNEMAKVDDSFFHRLEESFLVEEDKKHERHPIFGNIVDEVAYHE
KYPTIYHLRKKLVDSTDKADLRLIYLALAHMIKFRGHFLIEGDLNPDNSDVDKLFIQLV
QTYNQLFEENPINASGVDAKAILSARLSKSRRLENLIAQLPGEKKNGLFGNLIALSLG
LTPNFKSNFDLAEDAKLQLSKDTYDDDLDNLLAQIGDQYADLFLAAKNLSDAILLSDIL
RVNTEITKAPLSASMIKRYDEHHQDLTLLKALVRQQLPEKYKEIFFDQSKNGYAGYID
GGASQEEFYKFIKPILEKMDGTEELLVKLNREDLLRKQRTFDNGSIPHQIHLGELHAI
LRRQEDFYPFLKDNREKIEKILTFRIPYYVGPLARGNSRFAWMTRKSEETITPWNFE
EVVDKGASAQSFIERMTNFDKNLPNEKVLPKHSLLYEYFTVYNELTKVKYVTEGMR
KPAFLSGEQKKAIVDLLFKTNRKVTVKQLKEDYFKKIECFDSVEISGVEDRFNASLGT
YHDLLKIIKDKDFLDNEENEDILEDIVLTLTLFEDREMIEERLKTYAHLFDDKVMKQLK
RRRYTGWGRLSRKLINGIRDKQSGKTILDFLKSDGFANRNFMQLIHDDSLTFKEDIQ
KAQVSGQGDSLHEHIANLAGSPAIKKGILQTVKVVDELVKVMGRHKPENIVIEMARE
NQTTQKGQKNSRERMKRIEEGIKELGSQILKEHPVENTQLQNEKLYLYYLQNGRDM
YVDQELDINRLSDYDVDHIVPQSFLKDDSIDNKVLTRSDKNRGKSDNVPSEEVVKK
MKNYWRQLLNAKLITQRKFDNLTKAERGGLSELDKAGFIKRQLVETRQITKHVAQIL
DSRMNTKYDENDKLIREVKVITLKSKLVSDFRKDFQFYKVREINNYHHAHDAYLNAV
VGTALIKKYPKLESEFVYGDYKVYDVRKMIAKSEQEIGKATAKYFFYSNIMNFFKTEIT
LANGEIRKRPLIETNGETGEIVWDKGRDFATVRKVLSMPQVNIVKKTEVQTGGFSKE
SILPKRNSDKLIARKKDWDPKKYGGFDSPTVAYSVLVVAKVEKGKSKKLKSVKELLG
ITIMERSSFEKNPIDFLEAKGYKEVKKDLIIKLPKYSLFELENGRKRMLASAGELQKGN
ELALPSKYVNFLYLASHYEKLKGSPEDNEQKQLFVEQHKHYLDEIIEQISEFSKRVILA
DANLDKVLSAYNKHRDKPIREQAENIIHLFTLTNLGAPAAFKYFDTTIDRKRYTSTKE
VLDATLIHQSITGLYETRIDLSQLGGDSGGSKRTADGSEFEPKKKRKVGGGGSGAT
NFSLLKQAGDVEENPGPMVSKGEELFTGVVPILVELDGDVNGHKFSVSGEGEGDA
TYGKLTLKFICTTGKLPVPWPTLVTTLTYGVQCFSRYPDHMKQHDFFKSAMPEGYV
QERTIFFKDDGNYKTRAEVKFEGDTLVNRIELKGIDFKEDGNILGHKLEYNYNSHNV
YIMADKQKNGIKVNFKIRHNIEDGSVQLADHYQQNTPIGDGPVLLPDNHYLSTQSAL
SKDPNEKRDHMVLLEFVTAAGITLGMDELYK
hUNG-BE4max(R33A/K34A)-ΔUGI, SEQ ID NO: 161
MKRTADGSEFESPKKKRKVIGQKTLYSFFSPSPARKRHAPSPEPAVQGTGVAGVP
EESGDAAAIPAKKAPAGQEEPGTPPSSPLSAEQLDRIQRNKAAALLRLAARNVPVG
FGESWKKHLSGEFGKPYFIKLMGFVAEERKHYTVYPPPHQVFTWTQMCDIKDVKV
VILGQDPYHGPNQAHGLCFSVQRPVPPPPSLENIYKELSTDIEDFVHPGHGDLSGW
AKQGVLLLNAVLTVRAHQANSHKERGWEQFTDAVVSWLNQNSNGLVFLLWGSYA
QKKGSAIDRKRHHVLQTAHPSPLSVYRGFFGCRHFSKTNELLQKSGKKPIDWKELS
GGSGGSGGSSSETGPVAVDPTLRRRIEPHEFEVFFDPRELAAETCLLYEINWGGRH
SIWRHTSQNTNKHVEVNFIEKFTTERYFCPNTRCSITWFLSWSPCGECSRAITEFLS
RYPHVTLFIYIARLYHHADPRNRQGLRDLISSGVTIQIMTEQESGYCWRNFVNYSPS
NEAHWPRYPHLWRLYVLELYCIILGLPPCLNILRRKQPQLTFFTIALQSCHYQRLPP
HILWATGLKSGGSSGGSSGSETPGTSESATPESSGGSSGGSDKKYSIGLAIGTNSV
GWAVITDEYKVPSKKFKVLGNTDRHSIKKNLIGALLFDSGETAEATRLKRTARRRYT
RRKNRICYLQEIFSNEMAKVDDSFFHRLEESFLVEEDKKHERHPIFGNIVDEVAYHE
KYPTIYHLRKKLVDSTDKADLRLIYLALAHMIKFRGHFLIEGDLNPDNSDVDKLFIQLV
QTYNQLFEENPINASGVDAKAILSARLSKSRRLENLIAQLPGEKKNGLFGNLIALSLG
LTPNFKSNFDLAEDAKLQLSKDTYDDDLDNLLAQIGDQYADLFLAAKNLSDAILLSDIL
RVNTEITKAPLSASMIKRYDEHHQDLTLLKALVRQQLPEKYKEIFFDQSKNGYAGYID
GGASQEEFYKFIKPILEKMDGTEELLVKLNREDLLRKQRTFDNGSIPHQIHLGELHAI
LRRQEDFYPFLKDNREKIEKILTFRIPYYVGPLARGNSRFAWMTRKSEETITPWNFE
EVVDKGASAQSFIERMTNFDKNLPNEKVLPKHSLLYEYFTVYNELTKVKYVTEGMR
KPAFLSGEQKKAIVDLLFKTNRKVTVKQLKEDYFKKIECFDSVEISGVEDRFNASLGT
YHDLLKIIKDKDFLDNEENEDILEDIVLTLTLFEDREMIEERLKTYAHLFDDKVMKQLK
RRRYTGWGRLSRKLINGIRDKQSGKTILDFLKSDGFANRNFMQLIHDDSLTFKEDIQ
KAQVSGQGDSLHEHIANLAGSPAIKKGILQTVKVVDELVKVMGRHKPENIVIEMARE
NQTTQKGQKNSRERMKRIEEGIKELGSQILKEHPVENTQLQNEKLYLYYLQNGRDM
YVDQELDINRLSDYDVDHIVPQSFLKDDSIDNKVLTRSDKNRGKSDNVPSEEVVKK
MKNYWRQLLNAKLITQRKFDNLTKAERGGLSELDKAGFIKRQLVETRQITKHVAQIL
DSRMNTKYDENDKLIREVKVITLKSKLVSDFRKDFQFYKVREINNYHHAHDAYLNAV
VGTALIKKYPKLESEFVYGDYKVYDVRKMIAKSEQEIGKATAKYFFYSNIMNFFKTEIT
LANGEIRKRPLIETNGETGEIVWDKGRDFATVRKVLSMPQVNIVKKTEVQTGGFSKE
SILPKRNSDKLIARKKDWDPKKYGGFDSPTVAYSVLVVAKVEKGKSKKLKSVKELLG
ITIMERSSFEKNPIDFLEAKGYKEVKKDLIIKLPKYSLFELENGRKRMLASAGELQKGN
ELALPSKYVNFLYLASHYEKLKGSPEDNEQKQLFVEQHKHYLDEIIEQISEFSKRVILA
DANLDKVLSAYNKHRDKPIREQAENIIHLFTLTNLGAPAAFKYFDTTIDRKRYTSTKE
VLDATLIHQSITGLYETRIDLSQLGGDSGGSKRTADGSEFEPKKKRKVGGGGSGAT
NFSLLKQAGDVEENPGPMVSKGEELFTGVVPILVELDGDVNGHKFSVSGEGEGDA
TYGKLTLKFICTTGKLPVPWPTLVTTLTYGVQCFSRYPDHMKQHDFFKSAMPEGYV
QERTIFFKDDGNYKTRAEVKFEGDTLVNRIELKGIDFKEDGNILGHKLEYNYNSHNV
YIMADKQKNGIKVNFKIRHNIEDGSVQLADHYQQNTPIGDGPVLLPDNHYLSTQSAL
SKDPNEKRDHMVLLEFVTAAGITLGMDELYK
hUNG-nCas9 for BE4max, SEQ ID NO: 162
MKRTADGSEFESPKKKRKVIGQKTLYSFFSPSPARKRHAPSPEPAVQGTGVAGVP
EESGDAAAIPAKKAPAGQEEPGTPPSSPLSAEQLDRIQRNKAAALLRLAARNVPVG
FGESWKKHLSGEFGKPYFIKLMGFVAEERKHYTVYPPPHQVFTWTQMCDIKDVKV
VILGQDPYHGPNQAHGLCFSVQRPVPPPPSLENIYKELSTDIEDFVHPGHGDLSGW
AKQGVLLLNAVLTVRAHQANSHKERGWEQFTDAVVSWLNQNSNGLVFLLWGSYA
QKKGSAIDRKRHHVLQTAHPSPLSVYRGFFGCRHFSKTNELLQKSGKKPIDWKELS
GGSGGSGGSSGGSSGGSSGSETPGTSESATPESSGGSSGGSDKKYSIGLAIGTNS
VGWAVITDEYKVPSKKFKVLGNTDRHSIKKNLIGALLFDSGETAEATRLKRTARRRY
TRRKNRICYLQEIFSNEMAKVDDSFFHRLEESFLVEEDKKHERHPIFGNIVDEVAYH
EKYPTIYHLRKKLVDSTDKADLRLIYLALAHMIKFRGHFLIEGDLNPDNSDVDKLFIQL
VQTYNQLFEENPINASGVDAKAILSARLSKSRRLENLIAQLPGEKKNGLFGNLIALSL
GLTPNFKSNFDLAEDAKLQLSKDTYDDDLDNLLAQIGDQYADLFLAAKNLSDAILLSD
ILRVNTEITKAPLSASMIKRYDEHHQDLTLLKALVRQQLPEKYKEIFFDQSKNGYAGYI
DGGASQEEFYKFIKPILEKMDGTEELLVKLNREDLLRKQRTFDNGSIPHQIHLGELHA
ILRRQEDFYPFLKDNREKIEKILTFRIPYYVGPLARGNSRFAWMTRKSEETITPWNFE
EVVDKGASAQSFIERMTNFDKNLPNEKVLPKHSLLYEYFTVYNELTKVKYVTEGMR
KPAFLSGEQKKAIVDLLFKTNRKVTVKQLKEDYFKKIECFDSVEISGVEDRFNASLGT
YHDLLKIIKDKDFLDNEENEDILEDIVLTLTLFEDREMIEERLKTYAHLFDDKVMKQLK
RRRYTGWGRLSRKLINGIRDKQSGKTILDFLKSDGFANRNFMQLIHDDSLTFKEDIQ
KAQVSGQGDSLHEHIANLAGSPAIKKGILQTVKVVDELVKVMGRHKPENIVIEMARE
NQTTQKGQKNSRERMKRIEEGIKELGSQILKEHPVENTQLQNEKLYLYYLQNGRDM
YVDQELDINRLSDYDVDHIVPQSFLKDDSIDNKVLTRSDKNRGKSDNVPSEEVVKK
MKNYWRQLLNAKLITQRKFDNLTKAERGGLSELDKAGFIKRQLVETRQITKHVAQIL
DSRMNTKYDENDKLIREVKVITLKSKLVSDFRKDFQFYKVREINNYHHAHDAYLNAV
VGTALIKKYPKLESEFVYGDYKVYDVRKMIAKSEQEIGKATAKYFFYSNIMNFFKTEIT
LANGEIRKRPLIETNGETGEIVWDKGRDFATVRKVLSMPQVNIVKKTEVQTGGFSKE
SILPKRNSDKLIARKKDWDPKKYGGFDSPTVAYSVLVVAKVEKGKSKKLKSVKELLG
ITIMERSSFEKNPIDFLEAKGYKEVKKDLIIKLPKYSLFELENGRKRMLASAGELQKGN
ELALPSKYVNFLYLASHYEKLKGSPEDNEQKQLFVEQHKHYLDEIIEQISEFSKRVILA
DANLDKVLSAYNKHRDKPIREQAENIIHLFTLTNLGAPAAFKYFDTTIDRKRYTSTKE
VLDATLIHQSITGLYETRIDLSQLGGDSGGSKRTADGSEFEPKKKRKVGGGGSGAT
NFSLLKQAGDVEENPGPMVSKGEELFTGVVPILVELDGDVNGHKFSVSGEGEGDA
TYGKLTLKFICTTGKLPVPWPTLVTTLTYGVQCFSRYPDHMKQHDFFKSAMPEGYV
QERTIFFKDDGNYKTRAEVKFEGDTLVNRIELKGIDFKEDGNILGHKLEYNYNSHNV
YIMADKQKNGIKVNFKIRHNIEDGSVQLADHYQQNTPIGDGPVLLPDNHYLSTQSAL
SKDPNEKRDHMVLLEFVTAAGITLGMDELYK
BE4max w/o UGI, SEQ ID NO: 163
MKRTADGSEFESPKKKRKVSSETGPVAVDPTLRRRIEPHEFEVFFDPRELRKETCL
LYEINWGGRHSIWRHTSQNTNKHVEVNFIEKFTTERYFCPNTRCSITWFLSWSPCG
ECSRAITEFLSRYPHVTLFIYIARLYHHADPRNRQGLRDLISSGVTIQIMTEQESGYC
WRNFVNYSPSNEAHWPRYPHLWVRLYVLELYCIILGLPPCLNILRRKQPQLTFFTIAL
QSCHYQRLPPHILWATGLKSGGSSGGSSGSETPGTSESATPESSGGSSGGSDKKY
SIGLAIGTNSVGWAVITDEYKVPSKKFKVLGNTDRHSIKKNLIGALLFDSGETAEATR
LKRTARRRYTRRKNRICYLQEIFSNEMAKVDDSFFHRLEESFLVEEDKKHERHPIFG
NIVDEVAYHEKYPTIYHLRKKLVDSTDKADLRLIYLALAHMIKFRGHFLIEGDLNPDNS
DVDKLFIQLVQTYNQLFEENPINASGVDAKAILSARLSKSRRLENLIAQLPGEKKNGL
FGNLIALSLGLTPNFKSNFDLAEDAKLQLSKDTYDDDLDNLLAQIGDQYADLFLAAKN
LSDAILLSDILRVNTEITKAPLSASMIKRYDEHHQDLTLLKALVRQQLPEKYKEIFFDQ
SKNGYAGYIDGGASQEEFYKFIKPILEKMDGTEELLVKLNREDLLRKQRTFDNGSIP
HQIHLGELHAILRRQEDFYPFLKDNREKIEKILTFRIPYYVGPLARGNSRFAWMTRKS
EETITPWNFEEVVDKGASAQSFIERMTNFDKNLPNEKVLPKHSLLYEYFTVYNELTK
VKYVTEGMRKPAFLSGEQKKAIVDLLFKTNRKVTVKQLKEDYFKKIECFDSVEISGV
EDRFNASLGTYHDLLKIIKDKDFLDNEENEDILEDIVLTLTLFEDREMIEERLKTYAHLF
DDKVMKQLKRRRYTGWGRLSRKLINGIRDKQSGKTILDFLKSDGFANRNFMQLIHD
DSLTFKEDIQKAQVSGQGDSLHEHIANLAGSPAIKKGILQTVKVVDELVKVMGRHKP
ENIVIEMARENQTTQKGQKNSRERMKRIEEGIKELGSQILKEHPVENTQLQNEKLYL
YYLQNGRDMYVDQELDINRLSDYDVDHIVPQSFLKDDSIDNKVLTRSDKNRGKSDN
VPSEEVVKKMKNYWRQLLNAKLITQRKFDNLTKAERGGLSELDKAGFIKRQLVETR
QITKHVAQILDSRMNTKYDENDKLIREVKVITLKSKLVSDFRKDFQFYKVREINNYHH
AHDAYLNAVVGTALIKKYPKLESEFVYGDYKVYDVRKMIAKSEQEIGKATAKYFFYS
NIMNFFKTEITLANGEIRKRPLIETNGETGEIVWDKGRDFATVRKVLSMPQVNIVKKT
EVQTGGFSKESILPKRNSDKLIARKKDWDPKKYGGFDSPTVAYSVLVVAKVEKGKS
KKLKSVKELLGITIMERSSFEKNPIDFLEAKGYKEVKKDLIIKLPKYSLFELENGRKRM
LASAGELQKGNELALPSKYVNFLYLASHYEKLKGSPEDNEQKQLFVEQHKHYLDEII
EQISEFSKRVILADANLDKVLSAYNKHRDKPIREQAENIIHLFTLTNLGAPAAFKYFDT
TIDRKRYTSTKEVLDATLIHQSITGLYETRIDLSQLGGDSGGSKRTADGSEFEPKKKR
KVGGGGSGATNFSLLKQAGDVEENPGPMVSKGEELFTGVVPILVELDGDVNGHKF
SVSGEGEGDATYGKLTLKFICTTGKLPVPWPTLVTTLTYGVQCFSRYPDHMKQHDF
FKSAMPEGYVQERTIFFKDDGNYKTRAEVKFEGDTLVNRIELKGIDFKEDGNILGHK
LEYNYNSHNVYIMADKQKNGIKVNFKIRHNIEDGSVQLADHYQQNTPIGDGPVLLPD
NHYLSTQSALSKDPNEKRDHMVLLEFVTAAGITLGMDELYK
nCas9 for BE4max-ΔUGI, SEQ ID NO: 164
MKRTADGSEFESPKKKRKVSGGSSGGSSGSETPGTSESATPESSGGSSGGSDKK
YSIGLAIGTNSVGWAVITDEYKVPSKKFKVLGNTDRHSIKKNLIGALLFDSGETAEAT
RLKRTARRRYTRRKNRICYLQEIFSNEMAKVDDSFFHRLEESFLVEEDKKHERHPIF
GNIVDEVAYHEKYPTIYHLRKKLVDSTDKADLRLIYLALAHMIKFRGHFLIEGDLNPDN
SDVDKLFIQLVQTYNQLFEENPINASGVDAKAILSARLSKSRRLENLIAQLPGEKKNG
LFGNLIALSLGLTPNFKSNFDLAEDAKLQLSKDTYDDDLDNLLAQIGDQYADLFLAAK
NLSDAILLSDILRVNTEITKAPLSASMIKRYDEHHQDLTLLKALVRQQLPEKYKEIFFD
QSKNGYAGYIDGGASQEEFYKFIKPILEKMDGTEELLVKLNREDLLRKQRTFDNGSI
PHQIHLGELHAILRRQEDFYPFLKDNREKIEKILTFRIPYYVGPLARGNSRFAWMTRK
SEETITPWNFEEWDKGASAQSFIERMTNFDKNLPNEKVLPKHSLLYEYFTVYNELT
KVKYVTEGMRKPAFLSGEQKKAIVDLLFKTNRKVTVKQLKEDYFKKIECFDSVEISG
VEDRFNASLGTYHDLLKIIKDKDFLDNEENEDILEDIVLTLTLFEDREMIEERLKTYAHL
FDDKVMKQLKRRRYTGWGRLSRKLINGIRDKQSGKTILDFLKSDGFANRNFMQLIH
DDSLTFKEDIQKAQVSGQGDSLHEHIANLAGSPAIKKGILQTVKVVDELVKVMGRHK
PENIVIEMARENQTTQKGQKNSRERMKRIEEGIKELGSQILKEHPVENTQLQNEKLY
LYYLQNGRDMYVDQELDINRLSDYDVDHIVPQSFLKDDSIDNKVLTRSDKNRGKSD
NVPSEEVVKKMKNYWRQLLNAKLITQRKFDNLTKAERGGLSELDKAGFIKRQLVET
RQITKHVAQILDSRMNTKYDENDKLIREVKVITLKSKLVSDFRKDFQFYKVREINNYH
HAHDAYLNAVVGTALIKKYPKLESEFVYGDYKVYDVRKMIAKSEQEIGKATAKYFFY
SNIMNFFKTEITLANGEIRKRPLIETNGETGEIVWDKGRDFATVRKVLSMPQVNIVKK
TEVQTGGFSKESILPKRNSDKLIARKKDWDPKKYGGFDSPTVAYSVLVVAKVEKGK
SKKLKSVKELLGITIMERSSFEKNPIDFLEAKGYKEVKKDLIIKLPKYSLFELENGRKR
MLASAGELQKGNELALPSKYVNFLYLASHYEKLKGSPEDNEQKQLFVEQHKHYLDE
IIEQISEFSKRVILADANLDKVLSAYNKHRDKPIREQAENIIHLFTLTNLGAPAAFKYFD
TTIDRKRYTSTKEVLDATLIHQSITGLYETRIDLSQLGGDSGGSKRTADGSEFEPKKK
RKVGGGGSGATNFSLLKQAGDVEENPGPMVSKGEELFTGVVPILVELDGDVNGHK
FSVSGEGEGDATYGKLTLKFICTTGKLPVPWPTLVTTLTYGVQCFSRYPDHMKQHD
FFKSAMPEGYVQERTIFFKDDGNYKTRAEVKFEGDTLVNRIELKGIDFKEDGNILGH
KLEYNYNSHNVYIMADKQKNGIKVNFKIRHNIEDGSVQLADHYQQNTPIGDGPVLLP
DNHYLSTQSALSKDPNEKRDHMVLLEFVTAAGITLGMDELYK
hA3A-BE3-ΔUGI-eUNG, SEQ ID NO: 165
MEASPASGPRHLMDPHIFTSNFNNGIGRHKTYLCYEVERLDNGTSVKMDQHRGFL
HNQAKNLLCGFYGRHAELRFLDLVPSLQLDPAQIYRVTWFISWSPCFSWGCAGEV
RAFLQENTHVRLRIFAARIYDYDPLYKEALQMLRDAGAQVSIMTYDEFKHCWDTFV
DHQGCPFQPWDGLDEHSQALSGRLRAILQNQGNSGSETPGTSESATPESDKKYSI
GLAIGTNSVGWAVITDEYKVPSKKFKVLGNTDRHSIKKNLIGALLFDSGETAEATRLK
RTARRRYTRRKNRICYLQEIFSNEMAKVDDSFFHRLEESFLVEEDKKHERHPIFGNI
VDEVAYHEKYPTIYHLRKKLVDSTDKADLRLIYLALAHMIKFRGHFLIEGDLNPDNSD
VDKLFIQLVQTYNQLFEENPINASGVDAKAILSARLSKSRRLENLIAQLPGEKKNGLF
GNLIALSLGLTPNFKSNFDLAEDAKLQLSKDTYDDDLDNLLAQIGDQYADLFLAAKNL
SDAILLSDILRVNTEITKAPLSASMIKRYDEHHQDLTLLKALVRQQLPEKYKEIFFDQS
KNGYAGYIDGGASQEEFYKFIKPILEKMDGTEELLVKLNREDLLRKQRTFDNGSIPH
QIHLGELHAILRRQEDFYPFLKDNREKIEKILTFRIPYYVGPLARGNSRFAWMTRKSE
ETITPWNFEEVVDKGASAQSFIERMTNFDKNLPNEKVLPKHSLLYEYFTVYNELTKV
KYVTEGMRKPAFLSGEQKKAIVDLLFKTNRKVTVKQLKEDYFKKIECFDSVEISGVE
DRFNASLGTYHDLLKIIKDKDFLDNEENEDILEDIVLTLTLFEDREMIEERLKTYAHLFD
DKVMKQLKRRRYTGWGRLSRKLINGIRDKQSGKTILDFLKSDGFANRNFMQLIHDD
SLTFKEDIQKAQVSGQGDSLHEHIANLAGSPAIKKGILQTVKVVDELVKVMGRHKPE
NIVIEMARENQTTQKGQKNSRERMKRIEEGIKELGSQILKEHPVENTQLQNEKLYLY
YLQNGRDMYVDQELDINRLSDYDVDHIVPQSFLKDDSIDNKVLTRSDKNRGKSDNV
PSEEVVKKMKNYWRQLLNAKLITQRKFDNLTKAERGGLSELDKAGFIKRQLVETRQI
TKHVAQILDSRMNTKYDENDKLIREVKVITLKSKLVSDFRKDFQFYKVREINNYHHAH
DAYLNAVVGTALIKKYPKLESEFVYGDYKVYDVRKMIAKSEQEIGKATAKYFFYSNIM
NFFKTEITLANGEIRKRPLIETNGETGEIVWDKGRDFATVRKVLSMPQVNIVKKTEVQ
TGGFSKESILPKRNSDKLIARKKDWDPKKYGGFDSPTVAYSVLVVAKVEKGKSKKL
KSVKELLGITIMERSSFEKNPIDFLEAKGYKEVKKDLIIKLPKYSLFELENGRKRMLAS
AGELQKGNELALPSKYVNFLYLASHYEKLKGSPEDNEQKQLFVEQHKHYLDEIIEQI
SEFSKRVILADANLDKVLSAYNKHRDKPIREQAENIIHLFTLTNLGAPAAFKYFDTTID
RKRYTSTKEVLDATLIHQSITGLYETRIDLSQLGGDSGGSANELTWHDVLAEEKQQP
YFLNTLQTVASERQSGVTIYPPQKDVFNAFRFTELGDVKVVILGQDPYHGPGQAHG
LAFSVRPGIAIPPSLLNMYKELENTIPGFTRPNHGYLESWARQGVLLLNTVLTVRAG
QAHSHASLGWETFTDKVISLINQHREGVVFLLWGSHAQKKGAIIDKQRHHVLKAPH
PSPLSAHRGFFGCNHFVLANQWLEQRGETPIDWMPVLPAESESGGSPKKKRKVG
GGGSGATNFSLLKQAGDVEENPGPMVSKGEELFTGVVPILVELDGDVNGHKFSVS
GEGEGDATYGKLTLKFICTTGKLPVPWPTLVTTLTYGVQCFSRYPDHMKQHDFFKS
AMPEGYVQERTIFFKDDGNYKTRAEVKFEGDTLVNRIELKGIDFKEDGNILGHKLEY
NYNSHNVYIMADKQKNGIKVNFKIRHNIEDGSVQLADHYQQNTPIGDGPVLLPDNHY
LSTQSALSKDPNEKRDHMVLLEFVTAAGITLGMDELYK
eA3A-BE3-ΔUGI-eUNG, SEQ ID NO: 166
MEASPASGPRHLMDPHIFTSNFNNGIGRHKTYLCYEVERLDNGTSVKMDQHRGFL
HGQAKNLLCGFYGRHAELRFLDLVPSLQLDPAQIYRVTWFISWSPCFSWGCAGEV
RAFLQENTHVRLRIFAARIYDYDPLYKEALQMLRDAGAQVSIMTYDEFKHCWDTFV
DHQGCPFQPWDGLDEHSQALSGRLRAILQNQGNSGSETPGTSESATPESDKKYSI
GLAIGTNSVGWAVITDEYKVPSKKFKVLGNTDRHSIKKNLIGALLFDSGETAEATRLK
RTARRRYTRRKNRICYLQEIFSNEMAKVDDSFFHRLEESFLVEEDKKHERHPIFGNI
VDEVAYHEKYPTIYHLRKKLVDSTDKADLRLIYLALAHMIKFRGHFLIEGDLNPDNSD
VDKLFIQLVQTYNQLFEENPINASGVDAKAILSARLSKSRRLENLIAQLPGEKKNGLF
GNLIALSLGLTPNFKSNFDLAEDAKLQLSKDTYDDDLDNLLAQIGDQYADLFLAAKNL
SDAILLSDILRVNTEITKAPLSASMIKRYDEHHQDLTLLKALVRQQLPEKYKEIFFDQS
KNGYAGYIDGGASQEEFYKFIKPILEKMDGTEELLVKLNREDLLRKQRTFDNGSIPH
QIHLGELHAILRRQEDFYPFLKDNREKIEKILTFRIPYYVGPLARGNSRFAWMTRKSE
ETITPWNFEEVVDKGASAQSFIERMTNFDKNLPNEKVLPKHSLLYEYFTVYNELTKV
KYVTEGMRKPAFLSGEQKKAIVDLLFKTNRKVTVKQLKEDYFKKIECFDSVEISGVE
DRFNASLGTYHDLLKIIKDKDFLDNEENEDILEDIVLTLTLFEDREMIEERLKTYAHLFD
DKVMKQLKRRRYTGWGRLSRKLINGIRDKQSGKTILDFLKSDGFANRNFMQLIHDD
SLTFKEDIQKAQVSGQGDSLHEHIANLAGSPAIKKGILQTVKVVDELVKVMGRHKPE
NIVIEMARENQTTQKGQKNSRERMKRIEEGIKELGSQILKEHPVENTQLQNEKLYLY
YLQNGRDMYVDQELDINRLSDYDVDHIVPQSFLKDDSIDNKVLTRSDKNRGKSDNV
PSEEVVKKMKNYWRQLLNAKLITQRKFDNLTKAERGGLSELDKAGFIKRQLVETRQI
TKHVAQILDSRMNTKYDENDKLIREVKVITLKSKLVSDFRKDFQFYKVREINNYHHAH
DAYLNAVVGTALIKKYPKLESEFVYGDYKVYDVRKMIAKSEQEIGKATAKYFFYSNIM
NFFKTEITLANGEIRKRPLIETNGETGEIVWDKGRDFATVRKVLSMPQVNIVKKTEVQ
TGGFSKESILPKRNSDKLIARKKDWDPKKYGGFDSPTVAYSVLVVAKVEKGKSKKL
KSVKELLGITIMERSSFEKNPIDFLEAKGYKEVKKDLIIKLPKYSLFELENGRKRMLAS
AGELQKGNELALPSKYVNFLYLASHYEKLKGSPEDNEQKQLFVEQHKHYLDEIIEQI
SEFSKRVILADANLDKVLSAYNKHRDKPIREQAENIIHLFTLTNLGAPAAFKYFDTTID
RKRYTSTKEVLDATLIHQSITGLYETRIDLSQLGGDSGGSANELTWHDVLAEEKQQP
YFLNTLQTVASERQSGVTIYPPQKDVFNAFRFTELGDVKVVILGQDPYHGPGQAHG
LAFSVRPGIAIPPSLLNMYKELENTIPGFTRPNHGYLESWARQGVLLLNTVLTVRAG
QAHSHASLGWETFTDKVISLINQHREGVVFLLWGSHAQKKGAIIDKQRHHVLKAPH
PSPLSAHRGFFGCNHFVLANQWLEQRGETPIDWMPVLPAESESGGSPKKKRKVG
GGGSGATNFSLLKQAGDVEENPGPMVSKGEELFTGVVPILVELDGDVNGHKFSVS
GEGEGDATYGKLTLKFICTTGKLPVPWPTLVTTLTYGVQCFSRYPDHMKQHDFFKS
AMPEGYVQERTIFFKDDGNYKTRAEVKFEGDTLVNRIELKGIDFKEDGNILGHKLEY
NYNSHNVYIMADKQKNGIKVNFKIRHNIEDGSVQLADHYQQNTPIGDGPVLLPDNHY
LSTQSALSKDPNEKRDHMVLLEFVTAAGITLGMDELYK
hAID-BE3-ΔUGI-eUNG, SEQ ID NO: 167
MDSLLMNRRKFLYQFKNVRWAKGRRETYLCYVVKRRDSATSFSLDFGYLRNKNGC
HVELLFLRYISDWDLDPGRCYRVTWFTSWSPCYDCARHVADFLRGNPNLSLRIFTA
RLYFCEDRKAEPEGLRRLHRAGVQIAIMTFKDYFYCWNTFVENHERTFKAWEGLHE
NSVRLSRQLRRILLPLYEVDDLRDAFRTLGLSGSETPGTSESATPESDKKYSIGLAIG
TNSVGWAVITDEYKVPSKKFKVLGNTDRHSIKKNLIGALLFDSGETAEATRLKRTAR
RRYTRRKNRICYLQEIFSNEMAKVDDSFFHRLEESFLVEEDKKHERHPIFGNIVDEV
AYHEKYPTIYHLRKKLVDSTDKADLRLIYLALAHMIKFRGHFLIEGDLNPDNSDVDKL
FIQLVQTYNQLFEENPINASGVDAKAILSARLSKSRRLENLIAQLPGEKKNGLFGNLIA
LSLGLTPNFKSNFDLAEDAKLQLSKDTYDDDLDNLLAQIGDQYADLFLAAKNLSDAIL
LSDILRVNTEITKAPLSASMIKRYDEHHQDLTLLKALVRQQLPEKYKEIFFDQSKNGY
AGYIDGGASQEEFYKFIKPILEKMDGTEELLVKLNREDLLRKQRTFDNGSIPHQIHLG
ELHAILRRQEDFYPFLKDNREKIEKILTFRIPYYVGPLARGNSRFAWMTRKSEETITP
WNFEEVVDKGASAQSFIERMTNFDKNLPNEKVLPKHSLLYEYFTVYNELTKVKYVT
EGMRKPAFLSGEQKKAIVDLLFKTNRKVTVKQLKEDYFKKIECFDSVEISGVEDRFN
ASLGTYHDLLKIIKDKDFLDNEENEDILEDIVLTLTLFEDREMIEERLKTYAHLFDDKV
MKQLKRRRYTGWGRLSRKLINGIRDKQSGKTILDFLKSDGFANRNFMQLIHDDSLTF
KEDIQKAQVSGQGDSLHEHIANLAGSPAIKKGILQTVKVVDELVKVMGRHKPENIVIE
MARENQTTQKGQKNSRERMKRIEEGIKELGSQILKEHPVENTQLQNEKLYLYYLQN
GRDMYVDQELDINRLSDYDVDHIVPQSFLKDDSIDNKVLTRSDKNRGKSDNVPSEE
VVKKMKNYWRQLLNAKLITQRKFDNLTKAERGGLSELDKAGFIKRQLVETRQITKHV
AQILDSRMNTKYDENDKLIREVKVITLKSKLVSDFRKDFQFYKVREINNYHHAHDAYL
NAVVGTALIKKYPKLESEFVYGDYKVYDVRKMIAKSEQEIGKATAKYFFYSNIMNFFK
TEITLANGEIRKRPLIETNGETGEIVWDKGRDFATVRKVLSMPQVNIVKKTEVQTGGF
SKESILPKRNSDKLIARKKDWDPKKYGGFDSPTVAYSVLVVAKVEKGKSKKLKSVKE
LLGITIMERSSFEKNPIDFLEAKGYKEVKKDLIIKLPKYSLFELENGRKRMLASAGELQ
KGNELALPSKYVNFLYLASHYEKLKGSPEDNEQKQLFVEQHKHYLDEIIEQISEFSKR
VILADANLDKVLSAYNKHRDKPIREQAENIIHLFTLTNLGAPAAFKYFDTTIDRKRYTS
TKEVLDATLIHQSITGLYETRIDLSQLGGDSGGSANELTWHDVLAEEKQQPYFLNTL
QTVASERQSGVTIYPPQKDVFNAFRFTELGDVKVVILGQDPYHGPGQAHGLAFSVR
PGIAIPPSLLNMYKELENTIPGFTRPNHGYLESWARQGVLLLNTVLTVRAGQAHSHA
SLGWETFTDKVISLINQHREGVVFLLWGSHAQKKGAIIDKQRHHVLKAPHPSPLSAH
RGFFGCNHFVLANQWLEQRGETPIDWMPVLPAESESGGSPKKKRKVGGGGSGAT
NFSLLKQAGDVEENPGPMVSKGEELFTGVVPILVELDGDVNGHKFSVSGEGEGDA
TYGKLTLKFICTTGKLPVPWPTLVTTLTYGVQCFSRYPDHMKQHDFFKSAMPEGYV
QERTIFFKDDGNYKTRAEVKFEGDTLVNRIELKGIDFKEDGNILGHKLEYNYNSHNV
YIMADKQKNGIKVNFKIRHNIEDGSVQLADHYQQNTPIGDGPVLLPDNHYLSTQSAL
SKDPNEKRDHMVLLEFVTAAGITLGMDELYK
nCas9-eUNG for BE3, SEQ ID NO: 168
MDKKYSIGLAIGTNSVGWAVITDEYKVPSKKFKVLGNTDRHSIKKNLIGALLFDSGET
AEATRLKRTARRRYTRRKNRICYLQEIFSNEMAKVDDSFFHRLEESFLVEEDKKHER
HPIFGNIVDEVAYHEKYPTIYHLRKKLVDSTDKADLRLIYLALAHMIKFRGHFLIEGDL
NPDNSDVDKLFIQLVQTYNQLFEENPINASGVDAKAILSARLSKSRRLENLIAQLPGE
KKNGLFGNLIALSLGLTPNFKSNFDLAEDAKLQLSKDTYDDDLDNLLAQIGDQYADL
FLAAKNLSDAILLSDILRVNTEITKAPLSASMIKRYDEHHQDLTLLKALVRQQLPEKYK
EIFFDQSKNGYAGYIDGGASQEEFYKFIKPILEKMDGTEELLVKLNREDLLRKQRTFD
NGSIPHQIHLGELHAILRRQEDFYPFLKDNREKIEKILTFRIPYYVGPLARGNSRFAW
MTRKSEETITPWNFEEVVDKGASAQSFIERMTNFDKNLPNEKVLPKHSLLYEYFTVY
NELTKVKYVTEGMRKPAFLSGEQKKAIVDLLFKTNRKVTVKQLKEDYFKKIECFDSV
EISGVEDRFNASLGTYHDLLKIIKDKDFLDNEENEDILEDIVLTLTLFEDREMIEERLKT
YAHLFDDKVMKQLKRRRYTGWGRLSRKLINGIRDKQSGKTILDFLKSDGFANRNFM
QLIHDDSLTFKEDIQKAQVSGQGDSLHEHIANLAGSPAIKKGILQTVKVVDELVKVMG
RHKPENIVIEMARENQTTQKGQKNSRERMKRIEEGIKELGSQILKEHPVENTQLQNE
KLYLYYLQNGRDMYVDQELDINRLSDYDVDHIVPQSFLKDDSIDNKVLTRSDKNRGK
SDNVPSEEVVKKMKNYWRQLLNAKLITQRKFDNLTKAERGGLSELDKAGFIKRQLV
ETRQITKHVAQILDSRMNTKYDENDKLIREVKVITLKSKLVSDFRKDFQFYKVREINN
YHHAHDAYLNAVVGTALIKKYPKLESEFVYGDYKVYDVRKMIAKSEQEIGKATAKYF
FYSNIMNFFKTEITLANGEIRKRPLIETNGETGEIVWDKGRDFATVRKVLSMPQVNIV
KKTEVQTGGFSKESILPKRNSDKLIARKKDWDPKKYGGFDSPTVAYSVLVVAKVEK
GKSKKLKSVKELLGITIMERSSFEKNPIDFLEAKGYKEVKKDLIIKLPKYSLFELENGR
KRMLASAGELQKGNELALPSKYVNFLYLASHYEKLKGSPEDNEQKQLFVEQHKHYL
DEIIEQISEFSKRVILADANLDKVLSAYNKHRDKPIREQAENIIHLFTLTNLGAPAAFKY
FDTTIDRKRYTSTKEVLDATLIHQSITGLYETRIDLSQLGGDSGGSANELTWHDVLAE
EKQQPYFLNTLQTVASERQSGVTIYPPQKDVFNAFRFTELGDVKVVILGQDPYHGP
GQAHGLAFSVRPGIAIPPSLLNMYKELENTIPGFTRPNHGYLESWARQGVLLLNTVL
TVRAGQAHSHASLGWETFTDKVISLINQHREGVVFLLWGSHAQKKGAIIDKQRHHV
LKAPHPSPLSAHRGFFGCNHFVLANQWLEQRGETPIDWMPVLPAESESGGSPKKK
RKVGGGGSGATNFSLLKQAGDVEENPGPMVSKGEELFTGVVPILVELDGDVNGHK
FSVSGEGEGDATYGKLTLKFICTTGKLPVPWPTLVTTLTYGVQCFSRYPDHMKQHD
FFKSAMPEGYVQERTIFFKDDGNYKTRAEVKFEGDTLVNRIELKGIDFKEDGNILGH
KLEYNYNSHNVYIMADKQKNGIKVNFKIRHNIEDGSVQLADHYQQNTPIGDGPVLLP
DNHYLSTQSALSKDPNEKRDHMVLLEFVTAAGITLGMDELYK
Target-AID-ΔUGI-eUNG, SEQ ID NO: 169
MAPKKKRKVGIHGVPAAMDKKYSIGLAIGTNSVGWAVITDEYKVPSKKFKVLGNTDR
HSIKKNLIGALLFDSGETAEATRLKRTARRRYTRRKNRICYLQEIFSNEMAKVDDSFF
HRLEESFLVEEDKKHERHPIFGNIVDEVAYHEKYPTIYHLRKKLVDSTDKADLRLIYLA
LAHMIKFRGHFLIEGDLNPDNSDVDKLFIQLVQTYNQLFEENPINASGVDAKAILSAR
LSKSRRLENLIAQLPGEKKNGLFGNLIALSLGLTPNFKSNFDLAEDAKLQLSKDTYDD
DLDNLLAQIGDQYADLFLAAKNLSDAILLSDILRVNTEITKAPLSASMIKRYDEHHQDL
TLLKALVRQQLPEKYKEIFFDQSKNGYAGYIDGGASQEEFYKFIKPILEKMDGTEELL
VKLNREDLLRKQRTFDNGSIPHQIHLGELHAILRRQEDFYPFLKDNREKIEKILTFRIP
YYVGPLARGNSRFAWMTRKSEETITPWNFEEWDKGASAQSFIERMTNFDKNLPN
EKVLPKHSLLYEYFTVYNELTKVKYVTEGMRKPAFLSGEQKKAIVDLLFKTNRKVTV
KQLKEDYFKKIECFDSVEISGVEDRFNASLGTYHDLLKIIKDKDFLDNEENEDILEDIV
LTLTLFEDREMIEERLKTYAHLFDDKVMKQLKRRRYTGWGRLSRKLINGIRDKQSGK
TILDFLKSDGFANRNFMQLIHDDSLTFKEDIQKAQVSGQGDSLHEHIANLAGSPAIKK
GILQTVKVVDELVKVMGRHKPENIVIEMARENQTTQKGQKNSRERMKRIEEGIKELG
SQILKEHPVENTQLQNEKLYLYYLQNGRDMYVDQELDINRLSDYDVDHIVPQSFLKD
DSIDNKVLTRSDKNRGKSDNVPSEEVVKKMKNYWRQLLNAKLITQRKFDNLTKAER
GGLSELDKAGFIKRQLVETRQITKHVAQILDSRMNTKYDENDKLIREVKVITLKSKLV
SDFRKDFQFYKVREINNYHHAHDAYLNAVVGTALIKKYPKLESEFVYGDYKVYDVRK
MIAKSEQEIGKATAKYFFYSNIMNFFKTEITLANGEIRKRPLIETNGETGEIVWDKGRD
FATVRKVLSMPQVNIVKKTEVQTGGFSKESILPKRNSDKLIARKKDWDPKKYGGFD
SPTVAYSVLVVAKVEKGKSKKLKSVKELLGITIMERSSFEKNPIDFLEAKGYKEVKKD
LIIKLPKYSLFELENGRKRMLASAGELQKGNELALPSKYVNFLYLASHYEKLKGSPED
NEQKQLFVEQHKHYLDEIIEQISEFSKRVILADANLDKVLSAYNKHRDKPIREQAENII
HLFTLTNLGAPAAFKYFDTTIDRKRYTSTKEVLDATLIHQSITGLYETRIDLSQLGGDS
RADPKKKRKVGGGGTGGGGSAEYVRALFDFNGNDEEDLPFKKGDILRIRDKPEEQ
WWNAEDSEGKRGMILVPYVEKYSGDYKDHDGDYKDHDIDYKDDDDKSGMTDAEY
VRIHEKLDIYTFKKQFFNNKKSVSHRCYVLFELKRRGERRACFWGYAVNKPQSGTE
RGIHAEIFSIRKVEEYLRDNPGQFTINWYSSWSPCADCAEKILEWYNQELRGNGHTL
KIWACKLYYEKNARNQIGLWNLRDNGVGLNVMVSEHYQCCRKIFIQSSHNQLNENR
WLEKTLKRAEKWRSELSIMIQVKILHTTKSPAVGPKKKRKVGTANELTWHDVLAEEK
QQPYFLNTLQTVASERQSGVTIYPPQKDVFNAFRFTELGDVKVVILGQDPYHGPGQ
AHGLAFSVRPGIAIPPSLLNMYKELENTIPGFTRPNHGYLESWARQGVLLLNTVLTV
RAGQAHSHASLGWETFTDKVISLINQHREGVVFLLWGSHAQKKGAIIDKQRHHVLK
APHPSPLSAHRGFFGCNHFVLANQWLEQRGETPIDWMPVLPAESEGGGGSGATN
FSLLKQAGDVEENPGPMVSKGEELFTGVVPILVELDGDVNGHKFSVSGEGEGDAT
YGKLTLKFICTTGKLPVPWPTLVTTLTYGVQCFSRYPDHMKQHDFFKSAMPEGYVQ
ERTIFFKDDGNYKTRAEVKFEGDTLVNRIELKGIDFKEDGNILGHKLEYNYNSHNVYI
MADKQKNGIKVNFKIRHNIEDGSVQLADHYQQNTPIGDGPVLLPDNHYLSTQSALSK
DPNEKRDHMVLLEFVTAAGITLGMDELYK
nCas9-eUNG for Target-AID, SEQ ID NO: 170
MAPKKKRKVGIHGVPAAMDKKYSIGLAIGTNSVGWAVITDEYKVPSKKFKVLGNTDR
HSIKKNLIGALLFDSGETAEATRLKRTARRRYTRRKNRICYLQEIFSNEMAKVDDSFF
HRLEESFLVEEDKKHERHPIFGNIVDEVAYHEKYPTIYHLRKKLVDSTDKADLRLIYLA
LAHMIKFRGHFLIEGDLNPDNSDVDKLFIQLVQTYNQLFEENPINASGVDAKAILSAR
LSKSRRLENLIAQLPGEKKNGLFGNLIALSLGLTPNFKSNFDLAEDAKLQLSKDTYDD
DLDNLLAQIGDQYADLFLAAKNLSDAILLSDILRVNTEITKAPLSASMIKRYDEHHQDL
TLLKALVRQQLPEKYKEIFFDQSKNGYAGYIDGGASQEEFYKFIKPILEKMDGTEELL
VKLNREDLLRKQRTFDNGSIPHQIHLGELHAILRRQEDFYPFLKDNREKIEKILTFRIP
YYVGPLARGNSRFAWMTRKSEETITPWNFEEWDKGASAQSFIERMTNFDKNLPN
EKVLPKHSLLYEYFTVYNELTKVKYVTEGMRKPAFLSGEQKKAIVDLLFKTNRKVTV
KQLKEDYFKKIECFDSVEISGVEDRFNASLGTYHDLLKIIKDKDFLDNEENEDILEDIV
LTLTLFEDREMIEERLKTYAHLFDDKVMKQLKRRRYTGWGRLSRKLINGIRDKQSGK
TILDFLKSDGFANRNFMQLIHDDSLTFKEDIQKAQVSGQGDSLHEHIANLAGSPAIKK
GILQTVKWDELVKVMGRHKPENIVIEMARENQTTQKGQKNSRERMKRIEEGIKELG
SQILKEHPVENTQLQNEKLYLYYLQNGRDMYVDQELDINRLSDYDVDHIVPQSFLKD
DSIDNKVLTRSDKNRGKSDNVPSEEVVKKMKNYWRQLLNAKLITQRKFDNLTKAER
GGLSELDKAGFIKRQLVETRQITKHVAQILDSRMNTKYDENDKLIREVKVITLKSKLV
SDFRKDFQFYKVREINNYHHAHDAYLNAVVGTALIKKYPKLESEFVYGDYKVYDVRK
MIAKSEQEIGKATAKYFFYSNIMNFFKTEITLANGEIRKRPLIETNGETGEIVWDKGRD
FATVRKVLSMPQVNIVKKTEVQTGGFSKESILPKRNSDKLIARKKDWDPKKYGGFD
SPTVAYSVLVVAKVEKGKSKKLKSVKELLGITIMERSSFEKNPIDFLEAKGYKEVKKD
LIIKLPKYSLFELENGRKRMLASAGELQKGNELALPSKYVNFLYLASHYEKLKGSPED
NEQKQLFVEQHKHYLDEIIEQISEFSKRVILADANLDKVLSAYNKHRDKPIREQAENII
HLFTLTNLGAPAAFKYFDTTIDRKRYTSTKEVLDATLIHQSITGLYETRIDLSQLGGDS
RADPKKKRKVGGGGTGGGGSAEYVRALFDFNGNDEEDLPFKKGDILRIRDKPEEQ
WWNAEDSEGKRGMILVPYVEKYSGDYKDHDGDYKDHDIDYKDDDDKSGGPKKKR
KVGTANELTWHDVLAEEKQQPYFLNTLQTVASERQSGVTIYPPQKDVFNAFRFTEL
GDVKVVILGQDPYHGPGQAHGLAFSVRPGIAIPPSLLNMYKELENTIPGFTRPNHGY
LESWARQGVLLLNTVLTVRAGQAHSHASLGWETFTDKVISLINQHREGVVFLLWGS
HAQKKGAIIDKQRHHVLKAPHPSPLSAHRGFFGCNHFVLANQWLEQRGETPIDWM
PVLPAESEGGGGSGATNFSLLKQAGDVEENPGPMVSKGEELFTGVVPILVELDGDV
NGHKFSVSGEGEGDATYGKLTLKFICTTGKLPVPWPTLVTTLTYGVQCFSRYPDHM
KQHDFFKSAMPEGYVQERTIFFKDDGNYKTRAEVKFEGDTLVNRIELKGIDFKEDG
NILGHKLEYNYNSHNVYIMADKQKNGIKVNFKIRHNIEDGSVQLADHYQQNTPIGDG
PVLLPDNHYLSTQSALSKDPNEKRDHMVLLEFVTAAGITLGMDELYK
hA3A-BE3-ΔUGI-hUNG, SEQ ID NO: 171
MEASPASGPRHLMDPHIFTSNFNNGIGRHKTYLCYEVERLDNGTSVKMDQHRGFL
HNQAKNLLCGFYGRHAELRFLDLVPSLQLDPAQIYRVTWFISWSPCFSWGCAGEV
RAFLQENTHVRLRIFAARIYDYDPLYKEALQMLRDAGAQVSIMTYDEFKHCWDTFV
DHQGCPFQPWDGLDEHSQALSGRLRAILQNQGNSGSETPGTSESATPESDKKYSI
GLAIGTNSVGWAVITDEYKVPSKKFKVLGNTDRHSIKKNLIGALLFDSGETAEATRLK
RTARRRYTRRKNRICYLQEIFSNEMAKVDDSFFHRLEESFLVEEDKKHERHPIFGNI
VDEVAYHEKYPTIYHLRKKLVDSTDKADLRLIYLALAHMIKFRGHFLIEGDLNPDNSD
VDKLFIQLVQTYNQLFEENPINASGVDAKAILSARLSKSRRLENLIAQLPGEKKNGLF
GNLIALSLGLTPNFKSNFDLAEDAKLQLSKDTYDDDLDNLLAQIGDQYADLFLAAKNL
SDAILLSDILRVNTEITKAPLSASMIKRYDEHHQDLTLLKALVRQQLPEKYKEIFFDQS
KNGYAGYIDGGASQEEFYKFIKPILEKMDGTEELLVKLNREDLLRKQRTFDNGSIPH
QIHLGELHAILRRQEDFYPFLKDNREKIEKILTFRIPYYVGPLARGNSRFAWMTRKSE
ETITPWNFEEVVDKGASAQSFIERMTNFDKNLPNEKVLPKHSLLYEYFTVYNELTKV
KYVTEGMRKPAFLSGEQKKAIVDLLFKTNRKVTVKQLKEDYFKKIECFDSVEISGVE
DRFNASLGTYHDLLKIIKDKDFLDNEENEDILEDIVLTLTLFEDREMIEERLKTYAHLFD
DKVMKQLKRRRYTGWGRLSRKLINGIRDKQSGKTILDFLKSDGFANRNFMQLIHDD
SLTFKEDIQKAQVSGQGDSLHEHIANLAGSPAIKKGILQTVKVVDELVKVMGRHKPE
NIVIEMARENQTTQKGQKNSRERMKRIEEGIKELGSQILKEHPVENTQLQNEKLYLY
YLQNGRDMYVDQELDINRLSDYDVDHIVPQSFLKDDSIDNKVLTRSDKNRGKSDNV
PSEEVVKKMKNYWRQLLNAKLITQRKFDNLTKAERGGLSELDKAGFIKRQLVETRQI
TKHVAQILDSRMNTKYDENDKLIREVKVITLKSKLVSDFRKDFQFYKVREINNYHHAH
DAYLNAVVGTALIKKYPKLESEFVYGDYKVYDVRKMIAKSEQEIGKATAKYFFYSNIM
NFFKTEITLANGEIRKRPLIETNGETGEIVWDKGRDFATVRKVLSMPQVNIVKKTEVQ
TGGFSKESILPKRNSDKLIARKKDWDPKKYGGFDSPTVAYSVLVVAKVEKGKSKKL
KSVKELLGITIMERSSFEKNPIDFLEAKGYKEVKKDLIIKLPKYSLFELENGRKRMLAS
AGELQKGNELALPSKYVNFLYLASHYEKLKGSPEDNEQKQLFVEQHKHYLDEIIEQI
SEFSKRVILADANLDKVLSAYNKHRDKPIREQAENIIHLFTLTNLGAPAAFKYFDTTID
RKRYTSTKEVLDATLIHQSITGLYETRIDLSQLGGDSGGSIGQKTLYSFFSPSPARKR
HAPSPEPAVQGTGVAGVPEESGDAAAIPAKKAPAGQEEPGTPPSSPLSAEQLDRIQ
RNKAAALLRLAARNVPVGFGESWKKHLSGEFGKPYFIKLMGFVAEERKHYTVYPPP
HQVFTWTQMCDIKDVKWILGQDPYHGPNQAHGLCFSVQRPVPPPPSLENIYKELS
TDIEDFVHPGHGDLSGWAKQGVLLLNAVLTVRAHQANSHKERGWEQFTDAVVSWL
NQNSNGLVFLLWGSYAQKKGSAIDRKRHHVLQTAHPSPLSVYRGFFGCRHFSKTN
ELLQKSGKKPIDWKELSGGSPKKKRKVGGGGSGATNFSLLKQAGDVEENPGPMVS
KGEELFTGVVPILVELDGDVNGHKFSVSGEGEGDATYGKLTLKFICTTGKLPVPWPT
LVTTLTYGVQCFSRYPDHMKQHDFFKSAMPEGYVQERTIFFKDDGNYKTRAEVKFE
GDTLVNRIELKGIDFKEDGNILGHKLEYNYNSHNVYIMADKQKNGIKVNFKIRHNIED
GSVQLADHYQQNTPIGDGPVLLPDNHYLSTQSALSKDPNEKRDHMVLLEFVTAAGI
TLGMDELYK
eA3A-BE3-ΔUGI-hUNG, SEQ ID NO: 172
MEASPASGPRHLMDPHIFTSNFNNGIGRHKTYLCYEVERLDNGTSVKMDQHRGFL
HGQAKNLLCGFYGRHAELRFLDLVPSLQLDPAQIYRVTWFISWSPCFSWGCAGEV
RAFLQENTHVRLRIFAARIYDYDPLYKEALQMLRDAGAQVSIMTYDEFKHCWDTFV
DHQGCPFQPWDGLDEHSQALSGRLRAILQNQGNSGSETPGTSESATPESDKKYSI
GLAIGTNSVGWAVITDEYKVPSKKFKVLGNTDRHSIKKNLIGALLFDSGETAEATRLK
RTARRRYTRRKNRICYLQEIFSNEMAKVDDSFFHRLEESFLVEEDKKHERHPIFGNI
VDEVAYHEKYPTIYHLRKKLVDSTDKADLRLIYLALAHMIKFRGHFLIEGDLNPDNSD
VDKLFIQLVQTYNQLFEENPINASGVDAKAILSARLSKSRRLENLIAQLPGEKKNGLF
GNLIALSLGLTPNFKSNFDLAEDAKLQLSKDTYDDDLDNLLAQIGDQYADLFLAAKNL
SDAILLSDILRVNTEITKAPLSASMIKRYDEHHQDLTLLKALVRQQLPEKYKEIFFDQS
KNGYAGYIDGGASQEEFYKFIKPILEKMDGTEELLVKLNREDLLRKQRTFDNGSIPH
QIHLGELHAILRRQEDFYPFLKDNREKIEKILTFRIPYYVGPLARGNSRFAWMTRKSE
ETITPWNFEEVVDKGASAQSFIERMTNFDKNLPNEKVLPKHSLLYEYFTVYNELTKV
KYVTEGMRKPAFLSGEQKKAIVDLLFKTNRKVTVKQLKEDYFKKIECFDSVEISGVE
DRFNASLGTYHDLLKIIKDKDFLDNEENEDILEDIVLTLTLFEDREMIEERLKTYAHLFD
DKVMKQLKRRRYTGWGRLSRKLINGIRDKQSGKTILDFLKSDGFANRNFMQLIHDD
SLTFKEDIQKAQVSGQGDSLHEHIANLAGSPAIKKGILQTVKVVDELVKVMGRHKPE
NIVIEMARENQTTQKGQKNSRERMKRIEEGIKELGSQILKEHPVENTQLQNEKLYLY
YLQNGRDMYVDQELDINRLSDYDVDHIVPQSFLKDDSIDNKVLTRSDKNRGKSDNV
PSEEVVKKMKNYWRQLLNAKLITQRKFDNLTKAERGGLSELDKAGFIKRQLVETRQI
TKHVAQILDSRMNTKYDENDKLIREVKVITLKSKLVSDFRKDFQFYKVREINNYHHAH
DAYLNAVVGTALIKKYPKLESEFVYGDYKVYDVRKMIAKSEQEIGKATAKYFFYSNIM
NFFKTEITLANGEIRKRPLIETNGETGEIVWDKGRDFATVRKVLSMPQVNIVKKTEVQ
TGGFSKESILPKRNSDKLIARKKDWDPKKYGGFDSPTVAYSVLWAKVEKGKSKKL
KSVKELLGITIMERSSFEKNPIDFLEAKGYKEVKKDLIIKLPKYSLFELENGRKRMLAS
AGELQKGNELALPSKYVNFLYLASHYEKLKGSPEDNEQKQLFVEQHKHYLDEIIEQI
SEFSKRVILADANLDKVLSAYNKHRDKPIREQAENIIHLFTLTNLGAPAAFKYFDTTID
RKRYTSTKEVLDATLIHQSITGLYETRIDLSQLGGDSGGSIGQKTLYSFFSPSPARKR
HAPSPEPAVQGTGVAGVPEESGDAAAIPAKKAPAGQEEPGTPPSSPLSAEQLDRIQ
RNKAAALLRLAARNVPVGFGESWKKHLSGEFGKPYFIKLMGFVAEERKHYTVYPPP
HQVFTWTQMCDIKDVKVVILGQDPYHGPNQAHGLCFSVQRPVPPPPSLENIYKELS
TDIEDFVHPGHGDLSGWAKQGVLLLNAVLTVRAHQANSHKERGWEQFTDAVVSWL
NQNSNGLVFLLWGSYAQKKGSAIDRKRHHVLQTAHPSPLSVYRGFFGCRHFSKTN
ELLQKSGKKPIDWKELSGGSPKKKRKVGGGGSGATNFSLLKQAGDVEENPGPMVS
KGEELFTGVVPILVELDGDVNGHKFSVSGEGEGDATYGKLTLKFICTTGKLPVPWPT
LVTTLTYGVQCFSRYPDHMKQHDFFKSAMPEGYVQERTIFFKDDGNYKTRAEVKFE
GDTLVNRIELKGIDFKEDGNILGHKLEYNYNSHNVYIMADKQKNGIKVNFKIRHNIED
GSVQLADHYQQNTPIGDGPVLLPDNHYLSTQSALSKDPNEKRDHMVLLEFVTAAGI
TLGMDELYK
hAID-BE3-ΔUGI-hUNG, SEQ ID NO: 173
MDSLLMNRRKFLYQFKNVRWAKGRRETYLCYVVKRRDSATSFSLDFGYLRNKNGC
HVELLFLRYISDWDLDPGRCYRVTWFTSWSPCYDCARHVADFLRGNPNLSLRIFTA
RLYFCEDRKAEPEGLRRLHRAGVQIAIMTFKDYFYCWNTFVENHERTFKAWEGLHE
NSVRLSRQLRRILLPLYEVDDLRDAFRTLGLSGSETPGTSESATPESDKKYSIGLAIG
TNSVGWAVITDEYKVPSKKFKVLGNTDRHSIKKNLIGALLFDSGETAEATRLKRTAR
RRYTRRKNRICYLQEIFSNEMAKVDDSFFHRLEESFLVEEDKKHERHPIFGNIVDEV
AYHEKYPTIYHLRKKLVDSTDKADLRLIYLALAHMIKFRGHFLIEGDLNPDNSDVDKL
FIQLVQTYNQLFEENPINASGVDAKAILSARLSKSRRLENLIAQLPGEKKNGLFGNLIA
LSLGLTPNFKSNFDLAEDAKLQLSKDTYDDDLDNLLAQIGDQYADLFLAAKNLSDAIL
LSDILRVNTEITKAPLSASMIKRYDEHHQDLTLLKALVRQQLPEKYKEIFFDQSKNGY
AGYIDGGASQEEFYKFIKPILEKMDGTEELLVKLNREDLLRKQRTFDNGSIPHQIHLG
ELHAILRRQEDFYPFLKDNREKIEKILTFRIPYYVGPLARGNSRFAWMTRKSEETITP
WNFEEVVDKGASAQSFIERMTNFDKNLPNEKVLPKHSLLYEYFTVYNELTKVKYVT
EGMRKPAFLSGEQKKAIVDLLFKTNRKVTVKQLKEDYFKKIECFDSVEISGVEDRFN
ASLGTYHDLLKIIKDKDFLDNEENEDILEDIVLTLTLFEDREMIEERLKTYAHLFDDKV
MKQLKRRRYTGWGRLSRKLINGIRDKQSGKTILDFLKSDGFANRNFMQLIHDDSLTF
KEDIQKAQVSGQGDSLHEHIANLAGSPAIKKGILQTVKVVDELVKVMGRHKPENIVIE
MARENQTTQKGQKNSRERMKRIEEGIKELGSQILKEHPVENTQLQNEKLYLYYLQN
GRDMYVDQELDINRLSDYDVDHIVPQSFLKDDSIDNKVLTRSDKNRGKSDNVPSEE
VVKKMKNYWRQLLNAKLITQRKFDNLTKAERGGLSELDKAGFIKRQLVETRQITKHV
AQILDSRMNTKYDENDKLIREVKVITLKSKLVSDFRKDFQFYKVREINNYHHAHDAYL
NAVVGTALIKKYPKLESEFVYGDYKVYDVRKMIAKSEQEIGKATAKYFFYSNIMNFFK
TEITLANGEIRKRPLIETNGETGEIVWDKGRDFATVRKVLSMPQVNIVKKTEVQTGGF
SKESILPKRNSDKLIARKKDWDPKKYGGFDSPTVAYSVLVVAKVEKGKSKKLKSVKE
LLGITIMERSSFEKNPIDFLEAKGYKEVKKDLIIKLPKYSLFELENGRKRMLASAGELQ
KGNELALPSKYVNFLYLASHYEKLKGSPEDNEQKQLFVEQHKHYLDEIIEQISEFSKR
VILADANLDKVLSAYNKHRDKPIREQAENIIHLFTLTNLGAPAAFKYFDTTIDRKRYTS
TKEVLDATLIHQSITGLYETRIDLSQLGGDSGGSIGQKTLYSFFSPSPARKRHAPSPE
PAVQGTGVAGVPEESGDAAAIPAKKAPAGQEEPGTPPSSPLSAEQLDRIQRNKAAA
LLRLAARNVPVGFGESWKKHLSGEFGKPYFIKLMGFVAEERKHYTVYPPPHQVFT
WTQMCDIKDVKVVILGQDPYHGPNQAHGLCFSVQRPVPPPPSLENIYKELSTDIEDF
VHPGHGDLSGWAKQGVLLLNAVLTVRAHQANSHKERGWEQFTDAVVSWLNQNSN
GLVFLLWGSYAQKKGSAIDRKRHHVLQTAHPSPLSVYRGFFGCRHFSKTNELLQKS
GKKPIDWKELSGGSPKKKRKVGGGGSGATNFSLLKQAGDVEENPGPMVSKGEELF
TGVVPILVELDGDVNGHKFSVSGEGEGDATYGKLTLKFICTTGKLPVPWPTLVTTLT
YGVQCFSRYPDHMKQHDFFKSAMPEGYVQERTIFFKDDGNYKTRAEVKFEGDTLV
NRIELKGIDFKEDGNILGHKLEYNYNSHNVYIMADKQKNGIKVNFKIRHNIEDGSVQL
ADHYQQNTPIGDGPVLLPDNHYLSTQSALSKDPNEKRDHMVLLEFVTAAGITLGMD
ELYK
nCas9-hUNG for BE3, SEQ ID NO: 174
MDKKYSIGLAIGTNSVGWAVITDEYKVPSKKFKVLGNTDRHSIKKNLIGALLFDSGET
AEATRLKRTARRRYTRRKNRICYLQEIFSNEMAKVDDSFFHRLEESFLVEEDKKHER
HPIFGNIVDEVAYHEKYPTIYHLRKKLVDSTDKADLRLIYLALAHMIKFRGHFLIEGDL
NPDNSDVDKLFIQLVQTYNQLFEENPINASGVDAKAILSARLSKSRRLENLIAQLPGE
KKNGLFGNLIALSLGLTPNFKSNFDLAEDAKLQLSKDTYDDDLDNLLAQIGDQYADL
FLAAKNLSDAILLSDILRVNTEITKAPLSASMIKRYDEHHQDLTLLKALVRQQLPEKYK
EIFFDQSKNGYAGYIDGGASQEEFYKFIKPILEKMDGTEELLVKLNREDLLRKQRTFD
NGSIPHQIHLGELHAILRRQEDFYPFLKDNREKIEKILTFRIPYYVGPLARGNSRFAW
MTRKSEETITPWNFEEVVDKGASAQSFIERMTNFDKNLPNEKVLPKHSLLYEYFTVY
NELTKVKYVTEGMRKPAFLSGEQKKAIVDLLFKTNRKVTVKQLKEDYFKKIECFDSV
EISGVEDRFNASLGTYHDLLKIIKDKDFLDNEENEDILEDIVLTLTLFEDREMIEERLKT
YAHLFDDKVMKQLKRRRYTGWGRLSRKLINGIRDKQSGKTILDFLKSDGFANRNFM
QLIHDDSLTFKEDIQKAQVSGQGDSLHEHIANLAGSPAIKKGILQTVKVVDELVKVMG
RHKPENIVIEMARENQTTQKGQKNSRERMKRIEEGIKELGSQILKEHPVENTQLQNE
KLYLYYLQNGRDMYVDQELDINRLSDYDVDHIVPQSFLKDDSIDNKVLTRSDKNRGK
SDNVPSEEVVKKMKNYWRQLLNAKLITQRKFDNLTKAERGGLSELDKAGFIKRQLV
ETRQITKHVAQILDSRMNTKYDENDKLIREVKVITLKSKLVSDFRKDFQFYKVREINN
YHHAHDAYLNAVVGTALIKKYPKLESEFVYGDYKVYDVRKMIAKSEQEIGKATAKYF
FYSNIMNFFKTEITLANGEIRKRPLIETNGETGEIVWDKGRDFATVRKVLSMPQVNIV
KKTEVQTGGFSKESILPKRNSDKLIARKKDWDPKKYGGFDSPTVAYSVLVVAKVEK
GKSKKLKSVKELLGITIMERSSFEKNPIDFLEAKGYKEVKKDLIIKLPKYSLFELENGR
KRMLASAGELQKGNELALPSKYVNFLYLASHYEKLKGSPEDNEQKQLFVEQHKHYL
DEIIEQISEFSKRVILADANLDKVLSAYNKHRDKPIREQAENIIHLFTLTNLGAPAAFKY
FDTTIDRKRYTSTKEVLDATLIHQSITGLYETRIDLSQLGGDSGGSIGQKTLYSFFSPS
PARKRHAPSPEPAVQGTGVAGVPEESGDAAAIPAKKAPAGQEEPGTPPSSPLSAE
QLDRIQRNKAAALLRLAARNVPVGFGESWKKHLSGEFGKPYFIKLMGFVAEERKHY
TVYPPPHQVFTWTQMCDIKDVKVVILGQDPYHGPNQAHGLCFSVQRPVPPPPSLE
NIYKELSTDIEDFVHPGHGDLSGWAKQGVLLLNAVLTVRAHQANSHKERGWEQFT
DAVVSWLNQNSNGLVFLLWGSYAQKKGSAIDRKRHHVLQTAHPSPLSVYRGFFGC
RHFSKTNELLQKSGKKPIDWKELSGGSPKKKRKVGGGGSGATNFSLLKQAGDVEE
NPGPMVSKGEELFTGVVPILVELDGDVNGHKFSVSGEGEGDATYGKLTLKFICTTG
KLPVPWPTLVTTLTYGVQCFSRYPDHMKQHDFFKSAMPEGYVQERTIFFKDDGNY
KTRAEVKFEGDTLVNRIELKGIDFKEDGNILGHKLEYNYNSHNVYIMADKQKNGIKVN
FKIRHNIEDGSVQLADHYQQNTPIGDGPVLLPDNHYLSTQSALSKDPNEKRDHMVLL
EFVTAAGITLGMDELYK
Target-AID-ΔUGI-hUNG, SEQ ID NO: 175
MAPKKKRKVGIHGVPAAMDKKYSIGLAIGTNSVGWAVITDEYKVPSKKFKVLGNTDR
HSIKKNLIGALLFDSGETAEATRLKRTARRRYTRRKNRICYLQEIFSNEMAKVDDSFF
HRLEESFLVEEDKKHERHPIFGNIVDEVAYHEKYPTIYHLRKKLVDSTDKADLRLIYLA
LAHMIKFRGHFLIEGDLNPDNSDVDKLFIQLVQTYNQLFEENPINASGVDAKAILSAR
LSKSRRLENLIAQLPGEKKNGLFGNLIALSLGLTPNFKSNFDLAEDAKLQLSKDTYDD
DLDNLLAQIGDQYADLFLAAKNLSDAILLSDILRVNTEITKAPLSASMIKRYDEHHQDL
TLLKALVRQQLPEKYKEIFFDQSKNGYAGYIDGGASQEEFYKFIKPILEKMDGTEELL
VKLNREDLLRKQRTFDNGSIPHQIHLGELHAILRRQEDFYPFLKDNREKIEKILTFRIP
YYVGPLARGNSRFAWMTRKSEETITPWNFEEVVDKGASAQSFIERMTNFDKNLPN
EKVLPKHSLLYEYFTVYNELTKVKYVTEGMRKPAFLSGEQKKAIVDLLFKTNRKVTV
KQLKEDYFKKIECFDSVEISGVEDRFNASLGTYHDLLKIIKDKDFLDNEENEDILEDIV
LTLTLFEDREMIEERLKTYAHLFDDKVMKQLKRRRYTGWGRLSRKLINGIRDKQSGK
TILDFLKSDGFANRNFMQLIHDDSLTFKEDIQKAQVSGQGDSLHEHIANLAGSPAIKK
GILQTVKWDELVKVMGRHKPENIVIEMARENQTTQKGQKNSRERMKRIEEGIKELG
SQILKEHPVENTQLQNEKLYLYYLQNGRDMYVDQELDINRLSDYDVDHIVPQSFLKD
DSIDNKVLTRSDKNRGKSDNVPSEEVVKKMKNYWRQLLNAKLITQRKFDNLTKAER
GGLSELDKAGFIKRQLVETRQITKHVAQILDSRMNTKYDENDKLIREVKVITLKSKLV
SDFRKDFQFYKVREINNYHHAHDAYLNAVVGTALIKKYPKLESEFVYGDYKVYDVRK
MIAKSEQEIGKATAKYFFYSNIMNFFKTEITLANGEIRKRPLIETNGETGEIVWDKGRD
FATVRKVLSMPQVNIVKKTEVQTGGFSKESILPKRNSDKLIARKKDWDPKKYGGFD
SPTVAYSVLVVAKVEKGKSKKLKSVKELLGITIMERSSFEKNPIDFLEAKGYKEVKKD
LIIKLPKYSLFELENGRKRMLASAGELQKGNELALPSKYVNFLYLASHYEKLKGSPED
NEQKQLFVEQHKHYLDEIIEQISEFSKRVILADANLDKVLSAYNKHRDKPIREQAENII
HLFTLTNLGAPAAFKYFDTTIDRKRYTSTKEVLDATLIHQSITGLYETRIDLSQLGGDS
RADPKKKRKVGGGGTGGGGSAEYVRALFDFNGNDEEDLPFKKGDILRIRDKPEEQ
WWNAEDSEGKRGMILVPYVEKYSGDYKDHDGDYKDHDIDYKDDDDKSGMTDAEY
VRIHEKLDIYTFKKQFFNNKKSVSHRCYVLFELKRRGERRACFWGYAVNKPQSGTE
RGIHAEIFSIRKVEEYLRDNPGQFTINWYSSWSPCADCAEKILEWYNQELRGNGHTL
KIWACKLYYEKNARNQIGLWNLRDNGVGLNVMVSEHYQCCRKIFIQSSHNQLNENR
WLEKTLKRAEKWRSELSIMIQVKILHTTKSPAVGPKKKRKVGTIGQKTLYSFFSPSPA
RKRHAPSPEPAVQGTGVAGVPEESGDAAAIPAKKAPAGQEEPGTPPSSPLSAEQL
DRIQRNKAAALLRLAARNVPVGFGESWKKHLSGEFGKPYFIKLMGFVAEERKHYTV
YPPPHQVFTWTQMCDIKDVKVVILGQDPYHGPNQAHGLCFSVQRPVPPPPSLENIY
KELSTDIEDFVHPGHGDLSGWAKQGVLLLNAVLTVRAHQANSHKERGWEQFTDAV
VSWLNQNSNGLVFLLWGSYAQKKGSAIDRKRHHVLQTAHPSPLSVYRGFFGCRHF
SKTNELLQKSGKKPIDWKELGGGGSGATNFSLLKQAGDVEENPGPMVSKGEELFT
GVVPILVELDGDVNGHKFSVSGEGEGDATYGKLTLKFICTTGKLPVPWPTLVTTLTY
GVQCFSRYPDHMKQHDFFKSAMPEGYVQERTIFFKDDGNYKTRAEVKFEGDTLVN
RIELKGIDFKEDGNILGHKLEYNYNSHNVYIMADKQKNGIKVNFKIRHNIEDGSVQLA
DHYQQNTPIGDGPVLLPDNHYLSTQSALSKDPNEKRDHMVLLEFVTAAGITLGMDE
LYK
nCas9-hUNG for Target-AID, SEQ ID NO: 176
MAPKKKRKVGIHGVPAAMDKKYSIGLAIGTNSVGWAVITDEYKVPSKKFKVLGNTDR
HSIKKNLIGALLFDSGETAEATRLKRTARRRYTRRKNRICYLQEIFSNEMAKVDDSFF
HRLEESFLVEEDKKHERHPIFGNIVDEVAYHEKYPTIYHLRKKLVDSTDKADLRLIYLA
LAHMIKFRGHFLIEGDLNPDNSDVDKLFIQLVQTYNQLFEENPINASGVDAKAILSAR
LSKSRRLENLIAQLPGEKKNGLFGNLIALSLGLTPNFKSNFDLAEDAKLQLSKDTYDD
DLDNLLAQIGDQYADLFLAAKNLSDAILLSDILRVNTEITKAPLSASMIKRYDEHHQDL
TLLKALVRQQLPEKYKEIFFDQSKNGYAGYIDGGASQEEFYKFIKPILEKMDGTEELL
VKLNREDLLRKQRTFDNGSIPHQIHLGELHAILRRQEDFYPFLKDNREKIEKILTFRIP
YYVGPLARGNSRFAWMTRKSEETITPWNFEEVVDKGASAQSFIERMTNFDKNLPN
EKVLPKHSLLYEYFTVYNELTKVKYVTEGMRKPAFLSGEQKKAIVDLLFKTNRKVTV
KQLKEDYFKKIECFDSVEISGVEDRFNASLGTYHDLLKIIKDKDFLDNEENEDILEDIV
LTLTLFEDREMIEERLKTYAHLFDDKVMKQLKRRRYTGWGRLSRKLINGIRDKQSGK
TILDFLKSDGFANRNFMQLIHDDSLTFKEDIQKAQVSGQGDSLHEHIANLAGSPAIKK
GILQTVKVVDELVKVMGRHKPENIVIEMARENQTTQKGQKNSRERMKRIEEGIKELG
SQILKEHPVENTQLQNEKLYLYYLQNGRDMYVDQELDINRLSDYDVDHIVPQSFLKD
DSIDNKVLTRSDKNRGKSDNVPSEEVVKKMKNYWRQLLNAKLITQRKFDNLTKAER
GGLSELDKAGFIKRQLVETRQITKHVAQILDSRMNTKYDENDKLIREVKVITLKSKLV
SDFRKDFQFYKVREINNYHHAHDAYLNAVVGTALIKKYPKLESEFVYGDYKVYDVRK
MIAKSEQEIGKATAKYFFYSNIMNFFKTEITLANGEIRKRPLIETNGETGEIVWDKGRD
FATVRKVLSMPQVNIVKKTEVQTGGFSKESILPKRNSDKLIARKKDWDPKKYGGFD
SPTVAYSVLVVAKVEKGKSKKLKSVKELLGITIMERSSFEKNPIDFLEAKGYKEVKKD
LIIKLPKYSLFELENGRKRMLASAGELQKGNELALPSKYVNFLYLASHYEKLKGSPED
NEQKQLFVEQHKHYLDEIIEQISEFSKRVILADANLDKVLSAYNKHRDKPIREQAENII
HLFTLTNLGAPAAFKYFDTTIDRKRYTSTKEVLDATLIHQSITGLYETRIDLSQLGGDS
RADPKKKRKVGGGGTGGGGSAEYVRALFDFNGNDEEDLPFKKGDILRIRDKPEEQ
WWNAEDSEGKRGMILVPYVEKYSGDYKDHDGDYKDHDIDYKDDDDKSGGPKKKR
KVGTIGQKTLYSFFSPSPARKRHAPSPEPAVQGTGVAGVPEESGDAAAIPAKKAPA
GQEEPGTPPSSPLSAEQLDRIQRNKAAALLRLAARNVPVGFGESWKKHLSGEFGK
PYFIKLMGFVAEERKHYTVYPPPHQVFTWTQMCDIKDVKVVILGQDPYHGPNQAHG
LCFSVQRPVPPPPSLENIYKELSTDIEDFVHPGHGDLSGWAKQGVLLLNAVLTVRAH
QANSHKERGWEQFTDAVVSWLNQNSNGLVFLLWGSYAQKKGSAIDRKRHHVLQT
AHPSPLSVYRGFFGCRHFSKTNELLQKSGKKPIDWKELGGGGSGATNFSLLKQAG
DVEENPGPMVSKGEELFTGVVPILVELDGDVNGHKFSVSGEGEGDATYGKLTLKFI
CTTGKLPVPWPTLVTTLTYGVQCFSRYPDHMKQHDFFKSAMPEGYVQERTIFFKD
DGNYKTRAEVKFEGDTLVNRIELKGIDFKEDGNILGHKLEYNYNSHNVYIMADKQKN
GIKVNFKIRHNIEDGSVQLADHYQQNTPIGDGPVLLPDNHYLSTQSALSKDPNEKRD
HMVLLEFVTAAGITLGMDELYK
hA3A-BE3 w/o UGI, SEQ ID NO: 177
MEASPASGPRHLMDPHIFTSNFNNGIGRHKTYLCYEVERLDNGTSVKMDQHRGFL
HNQAKNLLCGFYGRHAELRFLDLVPSLQLDPAQIYRVTWFISWSPCFSWGCAGEV
RAFLQENTHVRLRIFAARIYDYDPLYKEALQMLRDAGAQVSIMTYDEFKHCWDTFV
DHQGCPFQPWDGLDEHSQALSGRLRAILQNQGNSGSETPGTSESATPESDKKYSI
GLAIGTNSVGWAVITDEYKVPSKKFKVLGNTDRHSIKKNLIGALLFDSGETAEATRLK
RTARRRYTRRKNRICYLQEIFSNEMAKVDDSFFHRLEESFLVEEDKKHERHPIFGNI
VDEVAYHEKYPTIYHLRKKLVDSTDKADLRLIYLALAHMIKFRGHFLIEGDLNPDNSD
VDKLFIQLVQTYNQLFEENPINASGVDAKAILSARLSKSRRLENLIAQLPGEKKNGLF
GNLIALSLGLTPNFKSNFDLAEDAKLQLSKDTYDDDLDNLLAQIGDQYADLFLAAKNL
SDAILLSDILRVNTEITKAPLSASMIKRYDEHHQDLTLLKALVRQQLPEKYKEIFFDQS
KNGYAGYIDGGASQEEFYKFIKPILEKMDGTEELLVKLNREDLLRKQRTFDNGSIPH
QIHLGELHAILRRQEDFYPFLKDNREKIEKILTFRIPYYVGPLARGNSRFAWMTRKSE
ETITPWNFEEVVDKGASAQSFIERMTNFDKNLPNEKVLPKHSLLYEYFTVYNELTKV
KYVTEGMRKPAFLSGEQKKAIVDLLFKTNRKVTVKQLKEDYFKKIECFDSVEISGVE
DRFNASLGTYHDLLKIIKDKDFLDNEENEDILEDIVLTLTLFEDREMIEERLKTYAHLFD
DKVMKQLKRRRYTGWGRLSRKLINGIRDKQSGKTILDFLKSDGFANRNFMQLIHDD
SLTFKEDIQKAQVSGQGDSLHEHIANLAGSPAIKKGILQTVKVVDELVKVMGRHKPE
NIVIEMARENQTTQKGQKNSRERMKRIEEGIKELGSQILKEHPVENTQLQNEKLYLY
YLQNGRDMYVDQELDINRLSDYDVDHIVPQSFLKDDSIDNKVLTRSDKNRGKSDNV
PSEEVVKKMKNYWRQLLNAKLITQRKFDNLTKAERGGLSELDKAGFIKRQLVETRQI
TKHVAQILDSRMNTKYDENDKLIREVKVITLKSKLVSDFRKDFQFYKVREINNYHHAH
DAYLNAVVGTALIKKYPKLESEFVYGDYKVYDVRKMIAKSEQEIGKATAKYFFYSNIM
NFFKTEITLANGEIRKRPLIETNGETGEIVWDKGRDFATVRKVLSMPQVNIVKKTEVQ
TGGFSKESILPKRNSDKLIARKKDWDPKKYGGFDSPTVAYSVLWAKVEKGKSKKL
KSVKELLGITIMERSSFEKNPIDFLEAKGYKEVKKDLIIKLPKYSLFELENGRKRMLAS
AGELQKGNELALPSKYVNFLYLASHYEKLKGSPEDNEQKQLFVEQHKHYLDEIIEQI
SEFSKRVILADANLDKVLSAYNKHRDKPIREQAENIIHLFTLTNLGAPAAFKYFDTTID
RKRYTSTKEVLDATLIHQSITGLYETRIDLSQLGGDSGGSPKKKRKVGGGGSGATNF
SLLKQAGDVEENPGPMVSKGEELFTGVVPILVELDGDVNGHKFSVSGEGEGDATY
GKLTLKFICTTGKLPVPWPTLVTTLTYGVQCFSRYPDHMKQHDFFKSAMPEGYVQE
RTIFFKDDGNYKTRAEVKFEGDTLVNRIELKGIDFKEDGNILGHKLEYNYNSHNVYIM
ADKQKNGIKVNFKIRHNIEDGSVQLADHYQQNTPIGDGPVLLPDNHYLSTQSALSKD
PNEKRDHMVLLEFVTAAGITLGMDELYK
eA3A-BE3 w/o UGI, SEQ ID NO: 178
MEASPASGPRHLMDPHIFTSNFNNGIGRHKTYLCYEVERLDNGTSVKMDQHRGFL
HGQAKNLLCGFYGRHAELRFLDLVPSLQLDPAQIYRVTWFISWSPCFSWGCAGEV
RAFLQENTHVRLRIFAARIYDYDPLYKEALQMLRDAGAQVSIMTYDEFKHCWDTFV
DHQGCPFQPWDGLDEHSQALSGRLRAILQNQGNSGSETPGTSESATPESDKKYSI
GLAIGTNSVGWAVITDEYKVPSKKFKVLGNTDRHSIKKNLIGALLFDSGETAEATRLK
RTARRRYTRRKNRICYLQEIFSNEMAKVDDSFFHRLEESFLVEEDKKHERHPIFGNI
VDEVAYHEKYPTIYHLRKKLVDSTDKADLRLIYLALAHMIKFRGHFLIEGDLNPDNSD
VDKLFIQLVQTYNQLFEENPINASGVDAKAILSARLSKSRRLENLIAQLPGEKKNGLF
GNLIALSLGLTPNFKSNFDLAEDAKLQLSKDTYDDDLDNLLAQIGDQYADLFLAAKNL
SDAILLSDILRVNTEITKAPLSASMIKRYDEHHQDLTLLKALVRQQLPEKYKEIFFDQS
KNGYAGYIDGGASQEEFYKFIKPILEKMDGTEELLVKLNREDLLRKQRTFDNGSIPH
QIHLGELHAILRRQEDFYPFLKDNREKIEKILTFRIPYYVGPLARGNSRFAWMTRKSE
ETITPWNFEEVVDKGASAQSFIERMTNFDKNLPNEKVLPKHSLLYEYFTVYNELTKV
KYVTEGMRKPAFLSGEQKKAIVDLLFKTNRKVTVKQLKEDYFKKIECFDSVEISGVE
DRFNASLGTYHDLLKIIKDKDFLDNEENEDILEDIVLTLTLFEDREMIEERLKTYAHLFD
DKVMKQLKRRRYTGWGRLSRKLINGIRDKQSGKTILDFLKSDGFANRNFMQLIHDD
SLTFKEDIQKAQVSGQGDSLHEHIANLAGSPAIKKGILQTVKVVDELVKVMGRHKPE
NIVIEMARENQTTQKGQKNSRERMKRIEEGIKELGSQILKEHPVENTQLQNEKLYLY
YLQNGRDMYVDQELDINRLSDYDVDHIVPQSFLKDDSIDNKVLTRSDKNRGKSDNV
PSEEVVKKMKNYWRQLLNAKLITQRKFDNLTKAERGGLSELDKAGFIKRQLVETRQI
TKHVAQILDSRMNTKYDENDKLIREVKVITLKSKLVSDFRKDFQFYKVREINNYHHAH
DAYLNAVVGTALIKKYPKLESEFVYGDYKVYDVRKMIAKSEQEIGKATAKYFFYSNIM
NFFKTEITLANGEIRKRPLIETNGETGEIVWDKGRDFATVRKVLSMPQVNIVKKTEVQ
TGGFSKESILPKRNSDKLIARKKDWDPKKYGGFDSPTVAYSVLVVAKVEKGKSKKL
KSVKELLGITIMERSSFEKNPIDFLEAKGYKEVKKDLIIKLPKYSLFELENGRKRMLAS
AGELQKGNELALPSKYVNFLYLASHYEKLKGSPEDNEQKQLFVEQHKHYLDEIIEQI
SEFSKRVILADANLDKVLSAYNKHRDKPIREQAENIIHLFTLTNLGAPAAFKYFDTTID
RKRYTSTKEVLDATLIHQSITGLYETRIDLSQLGGDSGGSPKKKRKVGGGGSGATNF
SLLKQAGDVEENPGPMVSKGEELFTGVVPILVELDGDVNGHKFSVSGEGEGDATY
GKLTLKFICTTGKLPVPWPTLVTTLTYGVQCFSRYPDHMKQHDFFKSAMPEGYVQE
RTIFFKDDGNYKTRAEVKFEGDTLVNRIELKGIDFKEDGNILGHKLEYNYNSHNVYIM
ADKQKNGIKVNFKIRHNIEDGSVQLADHYQQNTPIGDGPVLLPDNHYLSTQSALSKD
PNEKRDHMVLLEFVTAAGITLGMDELYK
hAID-BE3 w/o UGI, SEQ ID NO: 179
MDSLLMNRRKFLYQFKNVRWAKGRRETYLCYVVKRRDSATSFSLDFGYLRNKNGC
HVELLFLRYISDWDLDPGRCYRVTWFTSWSPCYDCARHVADFLRGNPNLSLRIFTA
RLYFCEDRKAEPEGLRRLHRAGVQIAIMTFKDYFYCWNTFVENHERTFKAWEGLHE
NSVRLSRQLRRILLPLYEVDDLRDAFRTLGLSGSETPGTSESATPESDKKYSIGLAIG
TNSVGWAVITDEYKVPSKKFKVLGNTDRHSIKKNLIGALLFDSGETAEATRLKRTAR
RRYTRRKNRICYLQEIFSNEMAKVDDSFFHRLEESFLVEEDKKHERHPIFGNIVDEV
AYHEKYPTIYHLRKKLVDSTDKADLRLIYLALAHMIKFRGHFLIEGDLNPDNSDVDKL
FIQLVQTYNQLFEENPINASGVDAKAILSARLSKSRRLENLIAQLPGEKKNGLFGNLIA
LSLGLTPNFKSNFDLAEDAKLQLSKDTYDDDLDNLLAQIGDQYADLFLAAKNLSDAIL
LSDILRVNTEITKAPLSASMIKRYDEHHQDLTLLKALVRQQLPEKYKEIFFDQSKNGY
AGYIDGGASQEEFYKFIKPILEKMDGTEELLVKLNREDLLRKQRTFDNGSIPHQIHLG
ELHAILRRQEDFYPFLKDNREKIEKILTFRIPYYVGPLARGNSRFAWMTRKSEETITP
WNFEEVVDKGASAQSFIERMTNFDKNLPNEKVLPKHSLLYEYFTVYNELTKVKYVT
EGMRKPAFLSGEQKKAIVDLLFKTNRKVTVKQLKEDYFKKIECFDSVEISGVEDRFN
ASLGTYHDLLKIIKDKDFLDNEENEDILEDIVLTLTLFEDREMIEERLKTYAHLFDDKV
MKQLKRRRYTGWGRLSRKLINGIRDKQSGKTILDFLKSDGFANRNFMQLIHDDSLTF
KEDIQKAQVSGQGDSLHEHIANLAGSPAIKKGILQTVKVVDELVKVMGRHKPENIVIE
MARENQTTQKGQKNSRERMKRIEEGIKELGSQILKEHPVENTQLQNEKLYLYYLQN
GRDMYVDQELDINRLSDYDVDHIVPQSFLKDDSIDNKVLTRSDKNRGKSDNVPSEE
VVKKMKNYWRQLLNAKLITQRKFDNLTKAERGGLSELDKAGFIKRQLVETRQITKHV
AQILDSRMNTKYDENDKLIREVKVITLKSKLVSDFRKDFQFYKVREINNYHHAHDAYL
NAVVGTALIKKYPKLESEFVYGDYKVYDVRKMIAKSEQEIGKATAKYFFYSNIMNFFK
TEITLANGEIRKRPLIETNGETGEIVWDKGRDFATVRKVLSMPQVNIVKKTEVQTGGF
SKESILPKRNSDKLIARKKDWDPKKYGGFDSPTVAYSVLVVAKVEKGKSKKLKSVKE
LLGITIMERSSFEKNPIDFLEAKGYKEVKKDLIIKLPKYSLFELENGRKRMLASAGELQ
KGNELALPSKYVNFLYLASHYEKLKGSPEDNEQKQLFVEQHKHYLDEIIEQISEFSKR
VILADANLDKVLSAYNKHRDKPIREQAENIIHLFTLTNLGAPAAFKYFDTTIDRKRYTS
TKEVLDATLIHQSITGLYETRIDLSQLGGDSGGSPKKKRKVGGGGSGATNFSLLKQA
GDVEENPGPMVSKGEELFTGVVPILVELDGDVNGHKFSVSGEGEGDATYGKLTLKF
ICTTGKLPVPWPTLVTTLTYGVQCFSRYPDHMKQHDFFKSAMPEGYVQERTIFFKD
DGNYKTRAEVKFEGDTLVNRIELKGIDFKEDGNILGHKLEYNYNSHNVYIMADKQKN
GIKVNFKIRHNIEDGSVQLADHYQQNTPIGDGPVLLPDNHYLSTQSALSKDPNEKRD
HMVLLEFVTAAGITLGMDELYK
nCas9 for BE3 w/o UGI, SEQ ID NO: 180
MDKKYSIGLAIGTNSVGWAVITDEYKVPSKKFKVLGNTDRHSIKKNLIGALLFDSGET
AEATRLKRTARRRYTRRKNRICYLQEIFSNEMAKVDDSFFHRLEESFLVEEDKKHER
HPIFGNIVDEVAYHEKYPTIYHLRKKLVDSTDKADLRLIYLALAHMIKFRGHFLIEGDL
NPDNSDVDKLFIQLVQTYNQLFEENPINASGVDAKAILSARLSKSRRLENLIAQLPGE
KKNGLFGNLIALSLGLTPNFKSNFDLAEDAKLQLSKDTYDDDLDNLLAQIGDQYADL
FLAAKNLSDAILLSDILRVNTEITKAPLSASMIKRYDEHHQDLTLLKALVRQQLPEKYK
EIFFDQSKNGYAGYIDGGASQEEFYKFIKPILEKMDGTEELLVKLNREDLLRKQRTFD
NGSIPHQIHLGELHAILRRQEDFYPFLKDNREKIEKILTFRIPYYVGPLARGNSRFAW
MTRKSEETITPWNFEEVVDKGASAQSFIERMTNFDKNLPNEKVLPKHSLLYEYFTVY
NELTKVKYVTEGMRKPAFLSGEQKKAIVDLLFKTNRKVTVKQLKEDYFKKIECFDSV
EISGVEDRFNASLGTYHDLLKIIKDKDFLDNEENEDILEDIVLTLTLFEDREMIEERLKT
YAHLFDDKVMKQLKRRRYTGWGRLSRKLINGIRDKQSGKTILDFLKSDGFANRNFM
QLIHDDSLTFKEDIQKAQVSGQGDSLHEHIANLAGSPAIKKGILQTVKVVDELVKVMG
RHKPENIVIEMARENQTTQKGQKNSRERMKRIEEGIKELGSQILKEHPVENTQLQNE
KLYLYYLQNGRDMYVDQELDINRLSDYDVDHIVPQSFLKDDSIDNKVLTRSDKNRGK
SDNVPSEEVVKKMKNYWRQLLNAKLITQRKFDNLTKAERGGLSELDKAGFIKRQLV
ETRQITKHVAQILDSRMNTKYDENDKLIREVKVITLKSKLVSDFRKDFQFYKVREINN
YHHAHDAYLNAVVGTALIKKYPKLESEFVYGDYKVYDVRKMIAKSEQEIGKATAKYF
FYSNIMNFFKTEITLANGEIRKRPLIETNGETGEIVWDKGRDFATVRKVLSMPQVNIV
KKTEVQTGGFSKESILPKRNSDKLIARKKDWDPKKYGGFDSPTVAYSVLVVAKVEK
GKSKKLKSVKELLGITIMERSSFEKNPIDFLEAKGYKEVKKDLIIKLPKYSLFELENGR
KRMLASAGELQKGNELALPSKYVNFLYLASHYEKLKGSPEDNEQKQLFVEQHKHYL
DEIIEQISEFSKRVILADANLDKVLSAYNKHRDKPIREQAENIIHLFTLTNLGAPAAFKY
FDTTIDRKRYTSTKEVLDATLIHQSITGLYETRIDLSQLGGDSGGSPKKKRKVGGGG
SGATNFSLLKQAGDVEENPGPMVSKGEELFTGVVPILVELDGDVNGHKFSVSGEG
EGDATYGKLTLKFICTTGKLPVPWPTLVTTLTYGVQCFSRYPDHMKQHDFFKSAMP
EGYVQERTIFFKDDGNYKTRAEVKFEGDTLVNRIELKGIDFKEDGNILGHKLEYNYN
SHNVYIMADKQKNGIKVNFKIRHNIEDGSVQLADHYQQNTPIGDGPVLLPDNHYLST
QSALSKDPNEKRDHMVLLEFVTAAGITLGMDELYK
Target-AID w/o UGI, SEQ ID NO: 181
MAPKKKRKVGIHGVPAAMDKKYSIGLAIGTNSVGWAVITDEYKVPSKKFKVLGNTDR
HSIKKNLIGALLFDSGETAEATRLKRTARRRYTRRKNRICYLQEIFSNEMAKVDDSFF
HRLEESFLVEEDKKHERHPIFGNIVDEVAYHEKYPTIYHLRKKLVDSTDKADLRLIYLA
LAHMIKFRGHFLIEGDLNPDNSDVDKLFIQLVQTYNQLFEENPINASGVDAKAILSAR
LSKSRRLENLIAQLPGEKKNGLFGNLIALSLGLTPNFKSNFDLAEDAKLQLSKDTYDD
DLDNLLAQIGDQYADLFLAAKNLSDAILLSDILRVNTEITKAPLSASMIKRYDEHHQDL
TLLKALVRQQLPEKYKEIFFDQSKNGYAGYIDGGASQEEFYKFIKPILEKMDGTEELL
VKLNREDLLRKQRTFDNGSIPHQIHLGELHAILRRQEDFYPFLKDNREKIEKILTFRIP
YYVGPLARGNSRFAWMTRKSEETITPWNFEEVVDKGASAQSFIERMTNFDKNLPN
EKVLPKHSLLYEYFTVYNELTKVKYVTEGMRKPAFLSGEQKKAIVDLLFKTNRKVTV
KQLKEDYFKKIECFDSVEISGVEDRFNASLGTYHDLLKIIKDKDFLDNEENEDILEDIV
LTLTLFEDREMIEERLKTYAHLFDDKVMKQLKRRRYTGWGRLSRKLINGIRDKQSGK
TILDFLKSDGFANRNFMQLIHDDSLTFKEDIQKAQVSGQGDSLHEHIANLAGSPAIKK
GILQTVKVVDELVKVMGRHKPENIVIEMARENQTTQKGQKNSRERMKRIEEGIKELG
SQILKEHPVENTQLQNEKLYLYYLQNGRDMYVDQELDINRLSDYDVDHIVPQSFLKD
DSIDNKVLTRSDKNRGKSDNVPSEEVVKKMKNYWRQLLNAKLITQRKFDNLTKAER
GGLSELDKAGFIKRQLVETRQITKHVAQILDSRMNTKYDENDKLIREVKVITLKSKLV
SDFRKDFQFYKVREINNYHHAHDAYLNAVVGTALIKKYPKLESEFVYGDYKVYDVRK
MIAKSEQEIGKATAKYFFYSNIMNFFKTEITLANGEIRKRPLIETNGETGEIVWDKGRD
FATVRKVLSMPQVNIVKKTEVQTGGFSKESILPKRNSDKLIARKKDWDPKKYGGFD
SPTVAYSVLVVAKVEKGKSKKLKSVKELLGITIMERSSFEKNPIDFLEAKGYKEVKKD
LIIKLPKYSLFELENGRKRMLASAGELQKGNELALPSKYVNFLYLASHYEKLKGSPED
NEQKQLFVEQHKHYLDEIIEQISEFSKRVILADANLDKVLSAYNKHRDKPIREQAENII
HLFTLTNLGAPAAFKYFDTTIDRKRYTSTKEVLDATLIHQSITGLYETRIDLSQLGGDS
RADPKKKRKVGGGGTGGGGSAEYVRALFDFNGNDEEDLPFKKGDILRIRDKPEEQ
WWNAEDSEGKRGMILVPYVEKYSGDYKDHDGDYKDHDIDYKDDDDKSGMTDAEY
VRIHEKLDIYTFKKQFFNNKKSVSHRCYVLFELKRRGERRACFWGYAVNKPQSGTE
RGIHAEIFSIRKVEEYLRDNPGQFTINWYSSWSPCADCAEKILEWYNQELRGNGHTL
KIWACKLYYEKNARNQIGLWNLRDNGVGLNVMVSEHYQCCRKIFIQSSHNQLNENR
WLEKTLKRAEKWRSELSIMIQVKILHTTKSPAVGPKKKRKVGGGGSGATNFSLLKQ
AGDVEENPGPMVSKGEELFTGVVPILVELDGDVNGHKFSVSGEGEGDATYGKLTL
KFICTTGKLPVPWPTLVTTLTYGVQCFSRYPDHMKQHDFFKSAMPEGYVQERTIFF
KDDGNYKTRAEVKFEGDTLVNRIELKGIDFKEDGNILGHKLEYNYNSHNVYIMADKQ
KNGIKVNFKIRHNIEDGSVQLADHYQQNTPIGDGPVLLPDNHYLSTQSALSKDPNEK
RDHMVLLEFVTAAGITLGMDELYK
nCas9 for Target-AID w/o UGI, SEQ ID NO: 182
MAPKKKRKVGIHGVPAAMDKKYSIGLAIGTNSVGWAVITDEYKVPSKKFKVLGNTDR
HSIKKNLIGALLFDSGETAEATRLKRTARRRYTRRKNRICYLQEIFSNEMAKVDDSFF
HRLEESFLVEEDKKHERHPIFGNIVDEVAYHEKYPTIYHLRKKLVDSTDKADLRLIYLA
LAHMIKFRGHFLIEGDLNPDNSDVDKLFIQLVQTYNQLFEENPINASGVDAKAILSAR
LSKSRRLENLIAQLPGEKKNGLFGNLIALSLGLTPNFKSNFDLAEDAKLQLSKDTYDD
DLDNLLAQIGDQYADLFLAAKNLSDAILLSDILRVNTEITKAPLSASMIKRYDEHHQDL
TLLKALVRQQLPEKYKEIFFDQSKNGYAGYIDGGASQEEFYKFIKPILEKMDGTEELL
VKLNREDLLRKQRTFDNGSIPHQIHLGELHAILRRQEDFYPFLKDNREKIEKILTFRIP
YYVGPLARGNSRFAWMTRKSEETITPWNFEEVVDKGASAQSFIERMTNFDKNLPN
EKVLPKHSLLYEYFTVYNELTKVKYVTEGMRKPAFLSGEQKKAIVDLLFKTNRKVTV
KQLKEDYFKKIECFDSVEISGVEDRFNASLGTYHDLLKIIKDKDFLDNEENEDILEDIV
LTLTLFEDREMIEERLKTYAHLFDDKVMKQLKRRRYTGWGRLSRKLINGIRDKQSGK
TILDFLKSDGFANRNFMQLIHDDSLTFKEDIQKAQVSGQGDSLHEHIANLAGSPAIKK
GILQTVKVVDELVKVMGRHKPENIVIEMARENQTTQKGQKNSRERMKRIEEGIKELG
SQILKEHPVENTQLQNEKLYLYYLQNGRDMYVDQELDINRLSDYDVDHIVPQSFLKD
DSIDNKVLTRSDKNRGKSDNVPSEEVVKKMKNYWRQLLNAKLITQRKFDNLTKAER
GGLSELDKAGFIKRQLVETRQITKHVAQILDSRMNTKYDENDKLIREVKVITLKSKLV
SDFRKDFQFYKVREINNYHHAHDAYLNAVVGTALIKKYPKLESEFVYGDYKVYDVRK
MIAKSEQEIGKATAKYFFYSNIMNFFKTEITLANGEIRKRPLIETNGETGEIVWDKGRD
FATVRKVLSMPQVNIVKKTEVQTGGFSKESILPKRNSDKLIARKKDWDPKKYGGFD
SPTVAYSVLVVAKVEKGKSKKLKSVKELLGITIMERSSFEKNPIDFLEAKGYKEVKKD
LIIKLPKYSLFELENGRKRMLASAGELQKGNELALPSKYVNFLYLASHYEKLKGSPED
NEQKQLFVEQHKHYLDEIIEQISEFSKRVILADANLDKVLSAYNKHRDKPIREQAENII
HLFTLTNLGAPAAFKYFDTTIDRKRYTSTKEVLDATLIHQSITGLYETRIDLSQLGGDS
RADPKKKRKVGGGGTGGGGSAEYVRALFDFNGNDEEDLPFKKGDILRIRDKPEEQ
WWNAEDSEGKRGMILVPYVEKYSGDYKDHDGDYKDHDIDYKDDDDKSGGPKKKR
KVGGGGSGATNFSLLKQAGDVEENPGPMVSKGEELFTGVVPILVELDGDVNGHKF
SVSGEGEGDATYGKLTLKFICTTGKLPVPWPTLVTTLTYGVQCFSRYPDHMKQHDF
FKSAMPEGYVQERTIFFKDDGNYKTRAEVKFEGDTLVNRIELKGIDFKEDGNILGHK
LEYNYNSHNVYIMADKQKNGIKVNFKIRHNIEDGSVQLADHYQQNTPIGDGPVLLPD
NHYLSTQSALSKDPNEKRDHMVLLEFVTAAGITLGMDE
SPACE-ΔUGI-eUNG, SEQ ID NO: 183
MKRTADGSEFESPKKKRKVSEVEFSHEYWMRHALTLAKRARDEREVPVGAVLVLN
NRVIGEGWNRAIGLHDPTAHAEIMALRQGGLVMQNYRLIDATLYGTFEPCVMCAGA
MIHSRIGRVVFGVRNAKTGAAGSLMDVLHYPGMNHRVEITEGILADECAALLCYFFR
MPRQVFNAQKKAQSSTDSGGSSGGSSGSETPGTSESATPESSGGSSGGSDKKYS
IGLAIGTNSVGWAVITDEYKVPSKKFKVLGNTDRHSIKKNLIGALLFDSGETAEATRL
KRTARRRYTRRKNRICYLQEIFSNEMAKVDDSFFHRLEESFLVEEDKKHERHPIFGN
IVDEVAYHEKYPTIYHLRKKLVDSTDKADLRLIYLALAHMIKFRGHFLIEGDLNPDNSD
VDKLFIQLVQTYNQLFEENPINASGVDAKAILSARLSKSRRLENLIAQLPGEKKNGLF
GNLIALSLGLTPNFKSNFDLAEDAKLQLSKDTYDDDLDNLLAQIGDQYADLFLAAKNL
SDAILLSDILRVNTEITKAPLSASMIKRYDEHHQDLTLLKALVRQQLPEKYKEIFFDQS
KNGYAGYIDGGASQEEFYKFIKPILEKMDGTEELLVKLNREDLLRKQRTFDNGSIPH
QIHLGELHAILRRQEDFYPFLKDNREKIEKILTFRIPYYVGPLARGNSRFAWMTRKSE
ETITPWNFEEVVDKGASAQSFIERMTNFDKNLPNEKVLPKHSLLYEYFTVYNELTKV
KYVTEGMRKPAFLSGEQKKAIVDLLFKTNRKVTVKQLKEDYFKKIECFDSVEISGVE
DRFNASLGTYHDLLKIIKDKDFLDNEENEDILEDIVLTLTLFEDREMIEERLKTYAHLFD
DKVMKQLKRRRYTGWGRLSRKLINGIRDKQSGKTILDFLKSDGFANRNFMQLIHDD
SLTFKEDIQKAQVSGQGDSLHEHIANLAGSPAIKKGILQTVKVVDELVKVMGRHKPE
NIVIEMARENQTTQKGQKNSRERMKRIEEGIKELGSQILKEHPVENTQLQNEKLYLY
YLQNGRDMYVDQELDINRLSDYDVDHIVPQSFLKDDSIDNKVLTRSDKNRGKSDNV
PSEEVVKKMKNYWRQLLNAKLITQRKFDNLTKAERGGLSELDKAGFIKRQLVETRQI
TKHVAQILDSRMNTKYDENDKLIREVKVITLKSKLVSDFRKDFQFYKVREINNYHHAH
DAYLNAVVGTALIKKYPKLESEFVYGDYKVYDVRKMIAKSEQEIGKATAKYFFYSNIM
NFFKTEITLANGEIRKRPLIETNGETGEIVWDKGRDFATVRKVLSMPQVNIVKKTEVQ
TGGFSKESILPKRNSDKLIARKKDWDPKKYGGFDSPTVAYSVLVVAKVEKGKSKKL
KSVKELLGITIMERSSFEKNPIDFLEAKGYKEVKKDLIIKLPKYSLFELENGRKRMLAS
AGELQKGNELALPSKYVNFLYLASHYEKLKGSPEDNEQKQLFVEQHKHYLDEIIEQI
SEFSKRVILADANLDKVLSAYNKHRDKPIREQAENIIHLFTLTNLGAPAAFKYFDTTID
RKRYTSTKEVLDATLIHQSITGLYETRIDLSQLGGDSGGSKRTADGSEFEPKKKRKV
SGGSSGGSSGSETPGTSESATPESSGGSSGGSTDAEYVRIHEKLDIYTFKKQFFNN
KKSVSHRCYVLFELKRRGERRACFWGYAVNKPQSGTERGIHAEIFSIRKVEEYLRD
NPGQFTINWYSSWSPCADCAEKILEWYNQELRGNGHTLKIWACKLYYEKNARNQI
GLWNLRDNGVGLNVMVSEHYQCCRKIFIQSSHNQLNENRWLEKTLKRAEKWRSEL
SIMIQVKILHTTKSPAVSGGSGGSGGSANELTWHDVLAEEKQQPYFLNTLQTVASE
RQSGVTIYPPQKDVFNAFRFTELGDVKVVILGQDPYHGPGQAHGLAFSVRPGIAIPP
SLLNMYKELENTIPGFTRPNHGYLESWARQGVLLLNTVLTVRAGQAHSHASLGWET
FTDKVISLINQHREGVVFLLWGSHAQKKGAIIDKQRHHVLKAPHPSPLSAHRGFFGC
NHFVLANQWLEQRGETPIDWMPVLPAESEGSGATNFSLLKQAGDVEENPGPMVSK
GEELFTGVVPILVELDGDVNGHKFSVSGEGEGDATYGKLTLKFICTTGKLPVPWPTL
VTTLTYGVQCFSRYPDHMKQHDFFKSAMPEGYVQERTIFFKDDGNYKTRAEVKFE
GDTLVNRIELKGIDFKEDGNILGHKLEYNYNSHNVYIMADKQKNGIKVNFKIRHNIED
GSVQLADHYQQNTPIGDGPVLLPDNHYLSTQSALSKDPNEKRDHMVLLEFVTAAGI
TLGMDELYKSGGSPKKKRKV
SPACE-ΔUGI-hUNG, SEQ ID NO: 184
MKRTADGSEFESPKKKRKVSEVEFSHEYWMRHALTLAKRARDEREVPVGAVLVLN
NRVIGEGWNRAIGLHDPTAHAEIMALRQGGLVMQNYRLIDATLYGTFEPCVMCAGA
MIHSRIGRVVFGVRNAKTGAAGSLMDVLHYPGMNHRVEITEGILADECAALLCYFFR
MPRQVFNAQKKAQSSTDSGGSSGGSSGSETPGTSESATPESSGGSSGGSDKKYS
IGLAIGTNSVGWAVITDEYKVPSKKFKVLGNTDRHSIKKNLIGALLFDSGETAEATRL
KRTARRRYTRRKNRICYLQEIFSNEMAKVDDSFFHRLEESFLVEEDKKHERHPIFGN
IVDEVAYHEKYPTIYHLRKKLVDSTDKADLRLIYLALAHMIKFRGHFLIEGDLNPDNSD
VDKLFIQLVQTYNQLFEENPINASGVDAKAILSARLSKSRRLENLIAQLPGEKKNGLF
GNLIALSLGLTPNFKSNFDLAEDAKLQLSKDTYDDDLDNLLAQIGDQYADLFLAAKNL
SDAILLSDILRVNTEITKAPLSASMIKRYDEHHQDLTLLKALVRQQLPEKYKEIFFDQS
KNGYAGYIDGGASQEEFYKFIKPILEKMDGTEELLVKLNREDLLRKQRTFDNGSIPH
QIHLGELHAILRRQEDFYPFLKDNREKIEKILTFRIPYYVGPLARGNSRFAWMTRKSE
ETITPWNFEEVVDKGASAQSFIERMTNFDKNLPNEKVLPKHSLLYEYFTVYNELTKV
KYVTEGMRKPAFLSGEQKKAIVDLLFKTNRKVTVKQLKEDYFKKIECFDSVEISGVE
DRFNASLGTYHDLLKIIKDKDFLDNEENEDILEDIVLTLTLFEDREMIEERLKTYAHLFD
DKVMKQLKRRRYTGWGRLSRKLINGIRDKQSGKTILDFLKSDGFANRNFMQLIHDD
SLTFKEDIQKAQVSGQGDSLHEHIANLAGSPAIKKGILQTVKVVDELVKVMGRHKPE
NIVIEMARENQTTQKGQKNSRERMKRIEEGIKELGSQILKEHPVENTQLQNEKLYLY
YLQNGRDMYVDQELDINRLSDYDVDHIVPQSFLKDDSIDNKVLTRSDKNRGKSDNV
PSEEVVKKMKNYWRQLLNAKLITQRKFDNLTKAERGGLSELDKAGFIKRQLVETRQI
TKHVAQILDSRMNTKYDENDKLIREVKVITLKSKLVSDFRKDFQFYKVREINNYHHAH
DAYLNAVVGTALIKKYPKLESEFVYGDYKVYDVRKMIAKSEQEIGKATAKYFFYSNIM
NFFKTEITLANGEIRKRPLIETNGETGEIVWDKGRDFATVRKVLSMPQVNIVKKTEVQ
TGGFSKESILPKRNSDKLIARKKDWDPKKYGGFDSPTVAYSVLVVAKVEKGKSKKL
KSVKELLGITIMERSSFEKNPIDFLEAKGYKEVKKDLIIKLPKYSLFELENGRKRMLAS
AGELQKGNELALPSKYVNFLYLASHYEKLKGSPEDNEQKQLFVEQHKHYLDEIIEQI
SEFSKRVILADANLDKVLSAYNKHRDKPIREQAENIIHLFTLTNLGAPAAFKYFDTTID
RKRYTSTKEVLDATLIHQSITGLYETRIDLSQLGGDSGGSKRTADGSEFEPKKKRKV
SGGSSGGSSGSETPGTSESATPESSGGSSGGSTDAEYVRIHEKLDIYTFKKQFFNN
KKSVSHRCYVLFELKRRGERRACFWGYAVNKPQSGTERGIHAEIFSIRKVEEYLRD
NPGQFTINWYSSWSPCADCAEKILEWYNQELRGNGHTLKIWACKLYYEKNARNQI
GLWNLRDNGVGLNVMVSEHYQCCRKIFIQSSHNQLNENRWLEKTLKRAEKWRSEL
SIMIQVKILHTTKSPAVSGGSGGSGGSIGQKTLYSFFSPSPARKRHAPSPEPAVQGT
GVAGVPEESGDAAAIPAKKAPAGQEEPGTPPSSPLSAEQLDRIQRNKAAALLRLAA
RNVPVGFGESWKKHLSGEFGKPYFIKLMGFVAEERKHYTVYPPPHQVFTWTQMCD
IKDVKVVILGQDPYHGPNQAHGLCFSVQRPVPPPPSLENIYKELSTDIEDFVHPGHG
DLSGWAKQGVLLLNAVLTVRAHQANSHKERGWEQFTDAVVSWLNQNSNGLVFLL
WGSYAQKKGSAIDRKRHHVLQTAHPSPLSVYRGFFGCRHFSKTNELLQKSGKKPID
WKELGSGATNFSLLKQAGDVEENPGPMVSKGEELFTGVVPILVELDGDVNGHKFS
VSGEGEGDATYGKLTLKFICTTGKLPVPWPTLVTTLTYGVQCFSRYPDHMKQHDFF
KSAMPEGYVQERTIFFKDDGNYKTRAEVKFEGDTLVNRIELKGIDFKEDGNILGHKL
EYNYNSHNVYIMADKQKNGIKVNFKIRHNIEDGSVQLADHYQQNTPIGDGPVLLPDN
HYLSTQSALSKDPNEKRDHMVLLEFVTAAGITLGMDELYKSGGSPKKKRKV
ABEmax-eUNG, SEQ ID NO: 185
MKRTADGSEFESPKKKRKVSEVEFSHEYWMRHALTLAKRAWDEREVPVGAVLVH
NNRVIGEGWNRPIGRHDPTAHAEIMALRQGGLVMQNYRLIDATLYVTLEPCVMCAG
AMIHSRIGRVVFGARDAKTGAAGSLMDVLHHPGMNHRVEITEGILADECAALLSDFF
RMRRQEIKAQKKAQSSTDSGGSSGGSSGSETPGTSESATPESSGGSSGGSSEVE
FSHEYWMRHALTLAKRARDEREVPVGAVLVLNNRVIGEGWNRAIGLHDPTAHAEIM
ALRQGGLVMQNYRLIDATLYVTFEPCVMCAGAMIHSRIGRVVFGVRNAKTGAAGSL
MDVLHYPGMNHRVEITEGILADECAALLCYFFRMPRQVFNAQKKAQSSTDSGGSS
GGSSGSETPGTSESATPESSGGSSGGSDKKYSIGLAIGTNSVGWAVITDEYKVPSK
KFKVLGNTDRHSIKKNLIGALLFDSGETAEATRLKRTARRRYTRRKNRICYLQEIFSN
EMAKVDDSFFHRLEESFLVEEDKKHERHPIFGNIVDEVAYHEKYPTIYHLRKKLVDS
TDKADLRLIYLALAHMIKFRGHFLIEGDLNPDNSDVDKLFIQLVQTYNQLFEENPINAS
GVDAKAILSARLSKSRRLENLIAQLPGEKKNGLFGNLIALSLGLTPNFKSNFDLAEDA
KLQLSKDTYDDDLDNLLAQIGDQYADLFLAAKNLSDAILLSDILRVNTEITKAPLSASM
IKRYDEHHQDLTLLKALVRQQLPEKYKEIFFDQSKNGYAGYIDGGASQEEFYKFIKPI
LEKMDGTEELLVKLNREDLLRKQRTFDNGSIPHQIHLGELHAILRRQEDFYPFLKDN
REKIEKILTFRIPYYVGPLARGNSRFAWMTRKSEETITPWNFEEVVDKGASAQSFIER
MTNFDKNLPNEKVLPKHSLLYEYFTVYNELTKVKYVTEGMRKPAFLSGEQKKAIVDL
LFKTNRKVTVKQLKEDYFKKIECFDSVEISGVEDRFNASLGTYHDLLKIIKDKDFLDN
EENEDILEDIVLTLTLFEDREMIEERLKTYAHLFDDKVMKQLKRRRYTGWGRLSRKLI
NGIRDKQSGKTILDFLKSDGFANRNFMQLIHDDSLTFKEDIQKAQVSGQGDSLHEHI
ANLAGSPAIKKGILQTVKVVDELVKVMGRHKPENMEMARENQTTQKGQKNSRER
MKRIEEGIKELGSQILKEHPVENTQLQNEKLYLYYLQNGRDMYVDQELDINRLSDYD
VDHIVPQSFLKDDSIDNKVLTRSDKNRGKSDNVPSEEVVKKMKNYWRQLLNAKLIT
QRKFDNLTKAERGGLSELDKAGFIKRQLVETRQITKHVAQILDSRMNTKYDENDKLI
REVKVITLKSKLVSDFRKDFQFYKVREINNYHHAHDAYLNAVVGTALIKKYPKLESEF
VYGDYKVYDVRKMIAKSEQEIGKATAKYFFYSNIMNFFKTEITLANGEIRKRPLIETNG
ETGEIVWDKGRDFATVRKVLSMPQVNIVKKTEVQTGGFSKESILPKRNSDKLIARKK
DWDPKKYGGFDSPTVAYSVLVVAKVEKGKSKKLKSVKELLGITIMERSSFEKNPIDF
LEAKGYKEVKKDLIIKLPKYSLFELENGRKRMLASAGELQKGNELALPSKYVNFLYLA
SHYEKLKGSPEDNEQKQLFVEQHKHYLDEIIEQISEFSKRVILADANLDKVLSAYNKH
RDKPIREQAENIIHLFTLTNLGAPAAFKYFDTTIDRKRYTSTKEVLDATLIHQSITGLYE
TRIDLSQLGGDSGGSGGSGGSANELTWHDVLAEEKQQPYFLNTLQTVASERQSGV
TIYPPQKDVFNAFRFTELGDVKVVILGQDPYHGPGQAHGLAFSVRPGIAIPPSLLNM
YKELENTIPGFTRPNHGYLESWARQGVLLLNTVLTVRAGQAHSHASLGWETFTDKV
ISLINQHREGVVFLLWGSHAQKKGAIIDKQRHHVLKAPHPSPLSAHRGFFGCNHFVL
ANQWLEQRGETPIDWMPVLPAESESGGSKRTADGSEFEPKKKRKVGSGATNFSLL
KQAGDVEENPGPMVSKGEELFTGVVPILVELDGDVNGHKFSVSGEGEGDATYGKL
TLKFICTTGKLPVPWPTLVTTLTYGVQCFSRYPDHMKQHDFFKSAMPEGYVQERTI
FFKDDGNYKTRAEVKFEGDTLVNRIELKGIDFKEDGNILGHKLEYNYNSHNVYIMAD
KQKNGIKVNFKIRHNIEDGSVQLADHYQQNTPIGDGPVLLPDNHYLSTQSALSKDPN
EKRDHMVLLEFVTAAGITLGMDELYKSGGSPKKKRKV
miniABEmax(V82G)-eUNG, SEQ ID NO: 186
MKRTADGSEFESPKKKRKVSEVEFSHEYWMRHALTLAKRARDEREVPVGAVLVLN
NRVIGEGWNRAIGLHDPTAHAEIMALRQGGLVMQNYRLIDATLYGTFEPCVMCAGA
MIHSRIGRWFGVRNAKTGAAGSLMDVLHYPGMNHRVEITEGILADECAALLCYFFR
MPRQVFNAQKKAQSSTDSGGSSGGSSGSETPGTSESATPESSGGSSGGSDKKYS
IGLAIGTNSVGWAVITDEYKVPSKKFKVLGNTDRHSIKKNLIGALLFDSGETAEATRL
KRTARRRYTRRKNRICYLQEIFSNEMAKVDDSFFHRLEESFLVEEDKKHERHPIFGN
IVDEVAYHEKYPTIYHLRKKLVDSTDKADLRLIYLALAHMIKFRGHFLIEGDLNPDNSD
VDKLFIQLVQTYNQLFEENPINASGVDAKAILSARLSKSRRLENLIAQLPGEKKNGLF
GNLIALSLGLTPNFKSNFDLAEDAKLQLSKDTYDDDLDNLLAQIGDQYADLFLAAKNL
SDAILLSDILRVNTEITKAPLSASMIKRYDEHHQDLTLLKALVRQQLPEKYKEIFFDQS
KNGYAGYIDGGASQEEFYKFIKPILEKMDGTEELLVKLNREDLLRKQRTFDNGSIPH
QIHLGELHAILRRQEDFYPFLKDNREKIEKILTFRIPYYVGPLARGNSRFAWMTRKSE
ETITPWNFEEVVDKGASAQSFIERMTNFDKNLPNEKVLPKHSLLYEYFTVYNELTKV
KYVTEGMRKPAFLSGEQKKAIVDLLFKTNRKVTVKQLKEDYFKKIECFDSVEISGVE
DRFNASLGTYHDLLKIIKDKDFLDNEENEDILEDIVLTLTLFEDREMIEERLKTYAHLFD
DKVMKQLKRRRYTGWGRLSRKLINGIRDKQSGKTILDFLKSDGFANRNFMQLIHDD
SLTFKEDIQKAQVSGQGDSLHEHIANLAGSPAIKKGILQTVKVVDELVKVMGRHKPE
NIVIEMARENQTTQKGQKNSRERMKRIEEGIKELGSQILKEHPVENTQLQNEKLYLY
YLQNGRDMYVDQELDINRLSDYDVDHIVPQSFLKDDSIDNKVLTRSDKNRGKSDNV
PSEEVVKKMKNYWRQLLNAKLITQRKFDNLTKAERGGLSELDKAGFIKRQLVETRQI
TKHVAQILDSRMNTKYDENDKLIREVKVITLKSKLVSDFRKDFQFYKVREINNYHHAH
DAYLNAVVGTALIKKYPKLESEFVYGDYKVYDVRKMIAKSEQEIGKATAKYFFYSNIM
NFFKTEITLANGEIRKRPLIETNGETGEIVWDKGRDFATVRKVLSMPQVNIVKKTEVQ
TGGFSKESILPKRNSDKLIARKKDWDPKKYGGFDSPTVAYSVLVVAKVEKGKSKKL
KSVKELLGITIMERSSFEKNPIDFLEAKGYKEVKKDLIIKLPKYSLFELENGRKRMLAS
AGELQKGNELALPSKYVNFLYLASHYEKLKGSPEDNEQKQLFVEQHKHYLDEIIEQI
SEFSKRVILADANLDKVLSAYNKHRDKPIREQAENIIHLFTLTNLGAPAAFKYFDTTID
RKRYTSTKEVLDATLIHQSITGLYETRIDLSQLGGDSGGSGGSGGSANELTWHDVL
AEEKQQPYFLNTLQTVASERQSGVTIYPPQKDVFNAFRFTELGDVKVVILGQDPYH
GPGQAHGLAFSVRPGIAIPPSLLNMYKELENTIPGFTRPNHGYLESWARQGVLLLNT
VLTVRAGQAHSHASLGWETFTDKVISLINQHREGVVFLLWGSHAQKKGAIIDKQRH
HVLKAPHPSPLSAHRGFFGCNHFVLANQWLEQRGETPIDWMPVLPAESESGGSKR
TADGSEFEPKKKRKVGSGATNFSLLKQAGDVEENPGPMVSKGEELFTGVVPILVEL
DGDVNGHKFSVSGEGEGDATYGKLTLKFICTTGKLPVPWPTLVTTLTYGVQCFSRY
PDHMKQHDFFKSAMPEGYVQERTIFFKDDGNYKTRAEVKFEGDTLVNRIELKGIDF
KEDGNILGHKLEYNYNSHNVYIMADKQKNGIKVNFKIRHNIEDGSVQLADHYQQNTP
IGDGPVLLPDNHYLSTQSALSKDPNEKRDHMVLLEFVTAAGITLGMDELYKSGGSP
KKKRKV
nCas9-eUNG for ABEmax, SEQ ID NO: 187
MKRTADGSEFESPKKKRKVSGGSSGGSSGSETPGTSESATPESSGGSSGGSDKK
YSIGLAIGTNSVGWAVITDEYKVPSKKFKVLGNTDRHSIKKNLIGALLFDSGETAEAT
RLKRTARRRYTRRKNRICYLQEIFSNEMAKVDDSFFHRLEESFLVEEDKKHERHPIF
GNIVDEVAYHEKYPTIYHLRKKLVDSTDKADLRLIYLALAHMIKFRGHFLIEGDLNPDN
SDVDKLFIQLVQTYNQLFEENPINASGVDAKAILSARLSKSRRLENLIAQLPGEKKNG
LFGNLIALSLGLTPNFKSNFDLAEDAKLQLSKDTYDDDLDNLLAQIGDQYADLFLAAK
NLSDAILLSDILRVNTEITKAPLSASMIKRYDEHHQDLTLLKALVRQQLPEKYKEIFFD
QSKNGYAGYIDGGASQEEFYKFIKPILEKMDGTEELLVKLNREDLLRKQRTFDNGSI
PHQIHLGELHAILRRQEDFYPFLKDNREKIEKILTFRIPYYVGPLARGNSRFAWMTRK
SEETITPWNFEEWDKGASAQSFIERMTNFDKNLPNEKVLPKHSLLYEYFTVYNELT
KVKYVTEGMRKPAFLSGEQKKAIVDLLFKTNRKVTVKQLKEDYFKKIECFDSVEISG
VEDRFNASLGTYHDLLKIIKDKDFLDNEENEDILEDIVLTLTLFEDREMIEERLKTYAHL
FDDKVMKQLKRRRYTGWGRLSRKLINGIRDKQSGKTILDFLKSDGFANRNFMQLIH
DDSLTFKEDIQKAQVSGQGDSLHEHIANLAGSPAIKKGILQTVKVVDELVKVMGRHK
PENIVIEMARENQTTQKGQKNSRERMKRIEEGIKELGSQILKEHPVENTQLQNEKLY
LYYLQNGRDMYVDQELDINRLSDYDVDHIVPQSFLKDDSIDNKVLTRSDKNRGKSD
NVPSEEVVKKMKNYWRQLLNAKLITQRKFDNLTKAERGGLSELDKAGFIKRQLVET
RQITKHVAQILDSRMNTKYDENDKLIREVKVITLKSKLVSDFRKDFQFYKVREINNYH
HAHDAYLNAVVGTALIKKYPKLESEFVYGDYKVYDVRKMIAKSEQEIGKATAKYFFY
SNIMNFFKTEITLANGEIRKRPLIETNGETGEIVWDKGRDFATVRKVLSMPQVNIVKK
TEVQTGGFSKESILPKRNSDKLIARKKDWDPKKYGGFDSPTVAYSVLVVAKVEKGK
SKKLKSVKELLGITIMERSSFEKNPIDFLEAKGYKEVKKDLIIKLPKYSLFELENGRKR
MLASAGELQKGNELALPSKYVNFLYLASHYEKLKGSPEDNEQKQLFVEQHKHYLDE
IIEQISEFSKRVILADANLDKVLSAYNKHRDKPIREQAENIIHLFTLTNLGAPAAFKYFD
TTIDRKRYTSTKEVLDATLIHQSITGLYETRIDLSQLGGDSGGSGGSGGSANELTWH
DVLAEEKQQPYFLNTLQTVASERQSGVTIYPPQKDVFNAFRFTELGDVKVVILGQDP
YHGPGQAHGLAFSVRPGIAIPPSLLNMYKELENTIPGFTRPNHGYLESWARQGVLLL
NTVLTVRAGQAHSHASLGWETFTDKVISLINQHREGVVFLLWGSHAQKKGAIIDKQR
HHVLKAPHPSPLSAHRGFFGCNHFVLANQWLEQRGETPIDWMPVLPAESESGGSK
RTADGSEFEPKKKRKVGSGATNFSLLKQAGDVEENPGPMVSKGEELFTGVVPILVE
LDGDVNGHKFSVSGEGEGDATYGKLTLKFICTTGKLPVPWPTLVTTLTYGVQCFSR
YPDHMKQHDFFKSAMPEGYVQERTIFFKDDGNYKTRAEVKFEGDTLVNRIELKGID
FKEDGNILGHKLEYNYNSHNVYIMADKQKNGIKVNFKIRHNIEDGSVQLADHYQQNT
PIGDGPVLLPDNHYLSTQSALSKDPNEKRDHMVLLEFVTAAGITLGMDELYKSGGS
PKKKRKV
eUNG-ABEmax, SEQ ID NO: 188
MKRTADGSEFESPKKKRKVANELTWHDVLAEEKQQPYFLNTLQTVASERQSGVTIY
PPQKDVFNAFRFTELGDVKVVILGQDPYHGPGQAHGLAFSVRPGIAIPPSLLNMYKE
LENTIPGFTRPNHGYLESWARQGVLLLNTVLTVRAGQAHSHASLGWETFTDKVISLI
NQHREGVVFLLWGSHAQKKGAIIDKQRHHVLKAPHPSPLSAHRGFFGCNHFVLAN
QWLEQRGETPIDWMPVLPAESESGGSGGSGGSSEVEFSHEYWMRHALTLAKRA
WDEREVPVGAVLVHNNRVIGEGWNRPIGRHDPTAHAEIMALRQGGLVMQNYRLID
ATLYVTLEPCVMCAGAMIHSRIGRVVFGARDAKTGAAGSLMDVLHHPGMNHRVEIT
EGILADECAALLSDFFRMRRQEIKAQKKAQSSTDSGGSSGGSSGSETPGTSESATP
ESSGGSSGGSSEVEFSHEYWMRHALTLAKRARDEREVPVGAVLVLNNRVIGEGW
NRAIGLHDPTAHAEIMALRQGGLVMQNYRLIDATLYVTFEPCVMCAGAMIHSRIGRV
VFGVRNAKTGAAGSLMDVLHYPGMNHRVEITEGILADECAALLCYFFRMPRQVFNA
QKKAQSSTDSGGSSGGSSGSETPGTSESATPESSGGSSGGSDKKYSIGLAIGTNS
VGWAVITDEYKVPSKKFKVLGNTDRHSIKKNLIGALLFDSGETAEATRLKRTARRRY
TRRKNRICYLQEIFSNEMAKVDDSFFHRLEESFLVEEDKKHERHPIFGNIVDEVAYH
EKYPTIYHLRKKLVDSTDKADLRLIYLALAHMIKFRGHFLIEGDLNPDNSDVDKLFIQL
VQTYNQLFEENPINASGVDAKAILSARLSKSRRLENLIAQLPGEKKNGLFGNLIALSL
GLTPNFKSNFDLAEDAKLQLSKDTYDDDLDNLLAQIGDQYADLFLAAKNLSDAILLSD
ILRVNTEITKAPLSASMIKRYDEHHQDLTLLKALVRQQLPEKYKEIFFDQSKNGYAGYI
DGGASQEEFYKFIKPILEKMDGTEELLVKLNREDLLRKQRTFDNGSIPHQIHLGELHA
ILRRQEDFYPFLKDNREKIEKILTFRIPYYVGPLARGNSRFAWMTRKSEETITPWNFE
EVVDKGASAQSFIERMTNFDKNLPNEKVLPKHSLLYEYFTVYNELTKVKYVTEGMR
KPAFLSGEQKKAIVDLLFKTNRKVTVKQLKEDYFKKIECFDSVEISGVEDRFNASLGT
YHDLLKIIKDKDFLDNEENEDILEDIVLTLTLFEDREMIEERLKTYAHLFDDKVMKQLK
RRRYTGWGRLSRKLINGIRDKQSGKTILDFLKSDGFANRNFMQLIHDDSLTFKEDIQ
KAQVSGQGDSLHEHIANLAGSPAIKKGILQTVKVVDELVKVMGRHKPENIVIEMARE
NQTTQKGQKNSRERMKRIEEGIKELGSQILKEHPVENTQLQNEKLYLYYLQNGRDM
YVDQELDINRLSDYDVDHIVPQSFLKDDSIDNKVLTRSDKNRGKSDNVPSEEVVKK
MKNYWRQLLNAKLITQRKFDNLTKAERGGLSELDKAGFIKRQLVETRQITKHVAQIL
DSRMNTKYDENDKLIREVKVITLKSKLVSDFRKDFQFYKVREINNYHHAHDAYLNAV
VGTALIKKYPKLESEFVYGDYKVYDVRKMIAKSEQEIGKATAKYFFYSNIMNFFKTEIT
LANGEIRKRPLIETNGETGEIVWDKGRDFATVRKVLSMPQVNIVKKTEVQTGGFSKE
SILPKRNSDKLIARKKDWDPKKYGGFDSPTVAYSVLVVAKVEKGKSKKLKSVKELLG
ITIMERSSFEKNPIDFLEAKGYKEVKKDLIIKLPKYSLFELENGRKRMLASAGELQKGN
ELALPSKYVNFLYLASHYEKLKGSPEDNEQKQLFVEQHKHYLDEIIEQISEFSKRVILA
DANLDKVLSAYNKHRDKPIREQAENIIHLFTLTNLGAPAAFKYFDTTIDRKRYTSTKE
VLDATLIHQSITGLYETRIDLSQLGGDSGGSKRTADGSEFEPKKKRKVGSGATNFSL
LKQAGDVEENPGPMVSKGEELFTGVVPILVELDGDVNGHKFSVSGEGEGDATYGK
LTLKFICTTGKLPVPWPTLVTTLTYGVQCFSRYPDHMKQHDFFKSAMPEGYVQERTI
FFKDDGNYKTRAEVKFEGDTLVNRIELKGIDFKEDGNILGHKLEYNYNSHNVYIMAD
KQKNGIKVNFKIRHNIEDGSVQLADHYQQNTPIGDGPVLLPDNHYLSTQSALSKDPN
EKRDHMVLLEFVTAAGITLGMDELYKSGGSPKKKRKV
eUNG-miniABEmax(V82G), SEQ ID NO: 189
MKRTADGSEFESPKKKRKVANELTWHDVLAEEKQQPYFLNTLQTVASERQSGVTIY
PPQKDVFNAFRFTELGDVKVVILGQDPYHGPGQAHGLAFSVRPGIAIPPSLLNMYKE
LENTIPGFTRPNHGYLESWARQGVLLLNTVLTVRAGQAHSHASLGWETFTDKVISLI
NQHREGVVFLLWGSHAQKKGAIIDKQRHHVLKAPHPSPLSAHRGFFGCNHFVLAN
QWLEQRGETPIDWMPVLPAESESGGSGGSGGSSEVEFSHEYWMRHALTLAKRAR
DEREVPVGAVLVLNNRVIGEGWNRAIGLHDPTAHAEIMALRQGGLVMQNYRLIDAT
LYGTFEPCVMCAGAMIHSRIGRWFGVRNAKTGAAGSLMDVLHYPGMNHRVEITE
GILADECAALLCYFFRMPRQVFNAQKKAQSSTDSGGSSGGSSGSETPGTSESATP
ESSGGSSGGSDKKYSIGLAIGTNSVGWAVITDEYKVPSKKFKVLGNTDRHSIKKNLI
GALLFDSGETAEATRLKRTARRRYTRRKNRICYLQEIFSNEMAKVDDSFFHRLEESF
LVEEDKKHERHPIFGNIVDEVAYHEKYPTIYHLRKKLVDSTDKADLRLIYLALAHMIKF
RGHFLIEGDLNPDNSDVDKLFIQLVQTYNQLFEENPINASGVDAKAILSARLSKSRRL
ENLIAQLPGEKKNGLFGNLIALSLGLTPNFKSNFDLAEDAKLQLSKDTYDDDLDNLLA
QIGDQYADLFLAAKNLSDAILLSDILRVNTEITKAPLSASMIKRYDEHHQDLTLLKALV
RQQLPEKYKEIFFDQSKNGYAGYIDGGASQEEFYKFIKPILEKMDGTEELLVKLNRE
DLLRKQRTFDNGSIPHQIHLGELHAILRRQEDFYPFLKDNREKIEKILTFRIPYYVGPL
ARGNSRFAWMTRKSEETITPWNFEEVVDKGASAQSFIERMTNFDKNLPNEKVLPK
HSLLYEYFTVYNELTKVKYVTEGMRKPAFLSGEQKKAIVDLLFKTNRKVTVKQLKED
YFKKIECFDSVEISGVEDRFNASLGTYHDLLKIIKDKDFLDNEENEDILEDIVLTLTLFE
DREMIEERLKTYAHLFDDKVMKQLKRRRYTGWGRLSRKLINGIRDKQSGKTILDFLK
SDGFANRNFMQLIHDDSLTFKEDIQKAQVSGQGDSLHEHIANLAGSPAIKKGILQTV
KWDELVKVMGRHKPENIVIEMARENQTTQKGQKNSRERMKRIEEGIKELGSQILKE
HPVENTQLQNEKLYLYYLQNGRDMYVDQELDINRLSDYDVDHIVPQSFLKDDSIDN
KVLTRSDKNRGKSDNVPSEEVVKKMKNYWRQLLNAKLITQRKFDNLTKAERGGLS
ELDKAGFIKRQLVETRQITKHVAQILDSRMNTKYDENDKLIREVKVITLKSKLVSDFRK
DFQFYKVREINNYHHAHDAYLNAVVGTALIKKYPKLESEFVYGDYKVYDVRKMIAKS
EQEIGKATAKYFFYSNIMNFFKTEITLANGEIRKRPLIETNGETGEIVWDKGRDFATV
RKVLSMPQVNIVKKTEVQTGGFSKESILPKRNSDKLIARKKDWDPKKYGGFDSPTV
AYSVLVVAKVEKGKSKKLKSVKELLGITIMERSSFEKNPIDFLEAKGYKEVKKDLIIKL
PKYSLFELENGRKRMLASAGELQKGNELALPSKYVNFLYLASHYEKLKGSPEDNEQ
KQLFVEQHKHYLDEIIEQISEFSKRVILADANLDKVLSAYNKHRDKPIREQAENIIHLFT
LTNLGAPAAFKYFDTTIDRKRYTSTKEVLDATLIHQSITGLYETRIDLSQLGGDSGGS
KRTADGSEFEPKKKRKVGSGATNFSLLKQAGDVEENPGPMVSKGEELFTGVVPILV
ELDGDVNGHKFSVSGEGEGDATYGKLTLKFICTTGKLPVPWPTLVTTLTYGVQCFS
RYPDHMKQHDFFKSAMPEGYVQERTIFFKDDGNYKTRAEVKFEGDTLVNRIELKGI
DFKEDGNILGHKLEYNYNSHNVYIMADKQKNGIKVNFKIRHNIEDGSVQLADHYQQN
TPIGDGPVLLPDNHYLSTQSALSKDPNEKRDHMVLLEFVTAAGITLGMDELYKSGGS
PKKKRKV
eUNG-nCas9 for ABEmax, SEQ ID NO: 190
MKRTADGSEFESPKKKRKVANELTWHDVLAEEKQQPYFLNTLQTVASERQSGVTIY
PPQKDVFNAFRFTELGDVKVVILGQDPYHGPGQAHGLAFSVRPGIAIPPSLLNMYKE
LENTIPGFTRPNHGYLESWARQGVLLLNTVLTVRAGQAHSHASLGWETFTDKVISLI
NQHREGVVFLLWGSHAQKKGAIIDKQRHHVLKAPHPSPLSAHRGFFGCNHFVLAN
QWLEQRGETPIDWMPVLPAESESGGSGGSGGSSGGSSGGSSGSETPGTSESATP
ESSGGSSGGSDKKYSIGLAIGTNSVGWAVITDEYKVPSKKFKVLGNTDRHSIKKNLI
GALLFDSGETAEATRLKRTARRRYTRRKNRICYLQEIFSNEMAKVDDSFFHRLEESF
LVEEDKKHERHPIFGNIVDEVAYHEKYPTIYHLRKKLVDSTDKADLRLIYLALAHMIKF
RGHFLIEGDLNPDNSDVDKLFIQLVQTYNQLFEENPINASGVDAKAILSARLSKSRRL
ENLIAQLPGEKKNGLFGNLIALSLGLTPNFKSNFDLAEDAKLQLSKDTYDDDLDNLLA
QIGDQYADLFLAAKNLSDAILLSDILRVNTEITKAPLSASMIKRYDEHHQDLTLLKALV
RQQLPEKYKEIFFDQSKNGYAGYIDGGASQEEFYKFIKPILEKMDGTEELLVKLNRE
DLLRKQRTFDNGSIPHQIHLGELHAILRRQEDFYPFLKDNREKIEKILTFRIPYYVGPL
ARGNSRFAWMTRKSEETITPWNFEEVVDKGASAQSFIERMTNFDKNLPNEKVLPK
HSLLYEYFTVYNELTKVKYVTEGMRKPAFLSGEQKKAIVDLLFKTNRKVTVKQLKED
YFKKIECFDSVEISGVEDRFNASLGTYHDLLKIIKDKDFLDNEENEDILEDIVLTLTLFE
DREMIEERLKTYAHLFDDKVMKQLKRRRYTGWGRLSRKLINGIRDKQSGKTILDFLK
SDGFANRNFMQLIHDDSLTFKEDIQKAQVSGQGDSLHEHIANLAGSPAIKKGILQTV
KVVDELVKVMGRHKPENIVIEMARENQTTQKGQKNSRERMKRIEEGIKELGSQILKE
HPVENTQLQNEKLYLYYLQNGRDMYVDQELDINRLSDYDVDHIVPQSFLKDDSIDN
KVLTRSDKNRGKSDNVPSEEVVKKMKNYWRQLLNAKLITQRKFDNLTKAERGGLS
ELDKAGFIKRQLVETRQITKHVAQILDSRMNTKYDENDKLIREVKVITLKSKLVSDFRK
DFQFYKVREINNYHHAHDAYLNAVVGTALIKKYPKLESEFVYGDYKVYDVRKMIAKS
EQEIGKATAKYFFYSNIMNFFKTEITLANGEIRKRPLIETNGETGEIVWDKGRDFATV
RKVLSMPQVNIVKKTEVQTGGFSKESILPKRNSDKLIARKKDWDPKKYGGFDSPTV
AYSVLVVAKVEKGKSKKLKSVKELLGITIMERSSFEKNPIDFLEAKGYKEVKKDLIIKL
PKYSLFELENGRKRMLASAGELQKGNELALPSKYVNFLYLASHYEKLKGSPEDNEQ
KQLFVEQHKHYLDEIIEQISEFSKRVILADANLDKVLSAYNKHRDKPIREQAENIIHLFT
LTNLGAPAAFKYFDTTIDRKRYTSTKEVLDATLIHQSITGLYETRIDLSQLGGDSGGS
KRTADGSEFEPKKKRKVGSGATNFSLLKQAGDVEENPGPMVSKGEELFTGVVPILV
ELDGDVNGHKFSVSGEGEGDATYGKLTLKFICTTGKLPVPWPTLVTTLTYGVQCFS
RYPDHMKQHDFFKSAMPEGYVQERTIFFKDDGNYKTRAEVKFEGDTLVNRIELKGI
DFKEDGNILGHKLEYNYNSHNVYIMADKQKNGIKVNFKIRHNIEDGSVQLADHYQQN
TPIGDGPVLLPDNHYLSTQSALSKDPNEKRDHMVLLEFVTAAGITLGMDELYKSGGS
PKKKRKV
ABEmax-hUNG, SEQ ID NO: 191
MKRTADGSEFESPKKKRKVSEVEFSHEYWMRHALTLAKRAWDEREVPVGAVLVH
NNRVIGEGWNRPIGRHDPTAHAEIMALRQGGLVMQNYRLIDATLYVTLEPCVMCAG
AMIHSRIGRVVFGARDAKTGAAGSLMDVLHHPGMNHRVEITEGILADECAALLSDFF
RMRRQEIKAQKKAQSSTDSGGSSGGSSGSETPGTSESATPESSGGSSGGSSEVE
FSHEYWMRHALTLAKRARDEREVPVGAVLVLNNRVIGEGWNRAIGLHDPTAHAEIM
ALRQGGLVMQNYRLIDATLYVTFEPCVMCAGAMIHSRIGRVVFGVRNAKTGAAGSL
MDVLHYPGMNHRVEITEGILADECAALLCYFFRMPRQVFNAQKKAQSSTDSGGSS
GGSSGSETPGTSESATPESSGGSSGGSDKKYSIGLAIGTNSVGWAVITDEYKVPSK
KFKVLGNTDRHSIKKNLIGALLFDSGETAEATRLKRTARRRYTRRKNRICYLQEIFSN
EMAKVDDSFFHRLEESFLVEEDKKHERHPIFGNIVDEVAYHEKYPTIYHLRKKLVDS
TDKADLRLIYLALAHMIKFRGHFLIEGDLNPDNSDVDKLFIQLVQTYNQLFEENPINAS
GVDAKAILSARLSKSRRLENLIAQLPGEKKNGLFGNLIALSLGLTPNFKSNFDLAEDA
KLQLSKDTYDDDLDNLLAQIGDQYADLFLAAKNLSDAILLSDILRVNTEITKAPLSASM
IKRYDEHHQDLTLLKALVRQQLPEKYKEIFFDQSKNGYAGYIDGGASQEEFYKFIKPI
LEKMDGTEELLVKLNREDLLRKQRTFDNGSIPHQIHLGELHAILRRQEDFYPFLKDN
REKIEKILTFRIPYYVGPLARGNSRFAWMTRKSEETITPWNFEEVVDKGASAQSFIER
MTNFDKNLPNEKVLPKHSLLYEYFTVYNELTKVKYVTEGMRKPAFLSGEQKKAIVDL
LFKTNRKVTVKQLKEDYFKKIECFDSVEISGVEDRFNASLGTYHDLLKIIKDKDFLDN
EENEDILEDIVLTLTLFEDREMIEERLKTYAHLFDDKVMKQLKRRRYTGWGRLSRKLI
NGIRDKQSGKTILDFLKSDGFANRNFMQLIHDDSLTFKEDIQKAQVSGQGDSLHEHI
ANLAGSPAIKKGILQTVKVVDELVKVMGRHKPENIVIEMARENQTTQKGQKNSRER
MKRIEEGIKELGSQILKEHPVENTQLQNEKLYLYYLQNGRDMYVDQELDINRLSDYD
VDHIVPQSFLKDDSIDNKVLTRSDKNRGKSDNVPSEEVVKKMKNYWRQLLNAKLIT
QRKFDNLTKAERGGLSELDKAGFIKRQLVETRQITKHVAQILDSRMNTKYDENDKLI
REVKVITLKSKLVSDFRKDFQFYKVREINNYHHAHDAYLNAVVGTALIKKYPKLESEF
VYGDYKVYDVRKMIAKSEQEIGKATAKYFFYSNIMNFFKTEITLANGEIRKRPLIETNG
ETGEIVWDKGRDFATVRKVLSMPQVNIVKKTEVQTGGFSKESILPKRNSDKLIARKK
DWDPKKYGGFDSPTVAYSVLVVAKVEKGKSKKLKSVKELLGITIMERSSFEKNPIDF
LEAKGYKEVKKDLIIKLPKYSLFELENGRKRMLASAGELQKGNELALPSKYVNFLYLA
SHYEKLKGSPEDNEQKQLFVEQHKHYLDEIIEQISEFSKRVILADANLDKVLSAYNKH
RDKPIREQAENIIHLFTLTNLGAPAAFKYFDTTIDRKRYTSTKEVLDATLIHQSITGLYE
TRIDLSQLGGDSGGSGGSGGSIGQKTLYSFFSPSPARKRHAPSPEPAVQGTGVAG
VPEESGDAAAIPAKKAPAGQEEPGTPPSSPLSAEQLDRIQRNKAAALLRLAARNVPV
GFGESWKKHLSGEFGKPYFIKLMGFVAEERKHYTVYPPPHQVFTWTQMCDIKDVK
VVILGQDPYHGPNQAHGLCFSVQRPVPPPPSLENIYKELSTDIEDFVHPGHGDLSG
WAKQGVLLLNAVLTVRAHQANSHKERGWEQFTDAVVSWLNQNSNGLVFLLWGSY
AQKKGSAIDRKRHHVLQTAHPSPLSVYRGFFGCRHFSKTNELLQKSGKKPIDWKEL
SGGSKRTADGSEFEPKKKRKVGSGATNFSLLKQAGDVEENPGPMVSKGEELFTGV
VPILVELDGDVNGHKFSVSGEGEGDATYGKLTLKFICTTGKLPVPWPTLVTTLTYGV
QCFSRYPDHMKQHDFFKSAMPEGYVQERTIFFKDDGNYKTRAEVKFEGDTLVNRIE
LKGIDFKEDGNILGHKLEYNYNSHNVYIMADKQKNGIKVNFKIRHNIEDGSVQLADHY
QQNTPIGDGPVLLPDNHYLSTQSALSKDPNEKRDHMVLLEFVTAAGITLGMDELYK
SGGSPKKKRKV
miniABEmax(V82G)-hUNG, SEQ ID NO: 192
MKRTADGSEFESPKKKRKVSEVEFSHEYWMRHALTLAKRARDEREVPVGAVLVLN
NRVIGEGWNRAIGLHDPTAHAEIMALRQGGLVMQNYRLIDATLYGTFEPCVMCAGA
MIHSRIGRVVFGVRNAKTGAAGSLMDVLHYPGMNHRVEITEGILADECAALLCYFFR
MPRQVFNAQKKAQSSTDSGGSSGGSSGSETPGTSESATPESSGGSSGGSDKKYS
IGLAIGTNSVGWAVITDEYKVPSKKFKVLGNTDRHSIKKNLIGALLFDSGETAEATRL
KRTARRRYTRRKNRICYLQEIFSNEMAKVDDSFFHRLEESFLVEEDKKHERHPIFGN
IVDEVAYHEKYPTIYHLRKKLVDSTDKADLRLIYLALAHMIKFRGHFLIEGDLNPDNSD
VDKLFIQLVQTYNQLFEENPINASGVDAKAILSARLSKSRRLENLIAQLPGEKKNGLF
GNLIALSLGLTPNFKSNFDLAEDAKLQLSKDTYDDDLDNLLAQIGDQYADLFLAAKNL
SDAILLSDILRVNTEITKAPLSASMIKRYDEHHQDLTLLKALVRQQLPEKYKEIFFDQS
KNGYAGYIDGGASQEEFYKFIKPILEKMDGTEELLVKLNREDLLRKQRTFDNGSIPH
QIHLGELHAILRRQEDFYPFLKDNREKIEKILTFRIPYYVGPLARGNSRFAWMTRKSE
ETITPWNFEEVVDKGASAQSFIERMTNFDKNLPNEKVLPKHSLLYEYFTVYNELTKV
KYVTEGMRKPAFLSGEQKKAIVDLLFKTNRKVTVKQLKEDYFKKIECFDSVEISGVE
DRFNASLGTYHDLLKIIKDKDFLDNEENEDILEDIVLTLTLFEDREMIEERLKTYAHLFD
DKVMKQLKRRRYTGWGRLSRKLINGIRDKQSGKTILDFLKSDGFANRNFMQLIHDD
SLTFKEDIQKAQVSGQGDSLHEHIANLAGSPAIKKGILQTVKVVDELVKVMGRHKPE
NIVIEMARENQTTQKGQKNSRERMKRIEEGIKELGSQILKEHPVENTQLQNEKLYLY
YLQNGRDMYVDQELDINRLSDYDVDHIVPQSFLKDDSIDNKVLTRSDKNRGKSDNV
PSEEVVKKMKNYWRQLLNAKLITQRKFDNLTKAERGGLSELDKAGFIKRQLVETRQI
TKHVAQILDSRMNTKYDENDKLIREVKVITLKSKLVSDFRKDFQFYKVREINNYHHAH
DAYLNAVVGTALIKKYPKLESEFVYGDYKVYDVRKMIAKSEQEIGKATAKYFFYSNIM
NFFKTEITLANGEIRKRPLIETNGETGEIVWDKGRDFATVRKVLSMPQVNIVKKTEVQ
TGGFSKESILPKRNSDKLIARKKDWDPKKYGGFDSPTVAYSVLVVAKVEKGKSKKL
KSVKELLGITIMERSSFEKNPIDFLEAKGYKEVKKDLIIKLPKYSLFELENGRKRMLAS
AGELQKGNELALPSKYVNFLYLASHYEKLKGSPEDNEQKQLFVEQHKHYLDEIIEQI
SEFSKRVILADANLDKVLSAYNKHRDKPIREQAENIIHLFTLTNLGAPAAFKYFDTTID
RKRYTSTKEVLDATLIHQSITGLYETRIDLSQLGGDSGGSGGSGGSIGQKTLYSFFS
PSPARKRHAPSPEPAVQGTGVAGVPEESGDAAAIPAKKAPAGQEEPGTPPSSPLS
AEQLDRIQRNKAAALLRLAARNVPVGFGESWKKHLSGEFGKPYFIKLMGFVAEERK
HYTVYPPPHQVFTWTQMCDIKDVKVVILGQDPYHGPNQAHGLCFSVQRPVPPPPS
LENIYKELSTDIEDFVHPGHGDLSGWAKQGVLLLNAVLTVRAHQANSHKERGWEQF
TDAVVSWLNQNSNGLVFLLWGSYAQKKGSAIDRKRHHVLQTAHPSPLSVYRGFFG
CRHFSKTNELLQKSGKKPIDWKELSGGSKRTADGSEFEPKKKRKVGSGATNFSLLK
QAGDVEENPGPMVSKGEELFTGWPILVELDGDVNGHKFSVSGEGEGDATYGKLT
LKFICTTGKLPVPWPTLVTTLTYGVQCFSRYPDHMKQHDFFKSAMPEGYVQERTIF
FKDDGNYKTRAEVKFEGDTLVNRIELKGIDFKEDGNILGHKLEYNYNSHNVYIMADK
QKNGIKVNFKIRHNIEDGSVQLADHYQQNTPIGDGPVLLPDNHYLSTQSALSKDPNE
KRDHMVLLEFVTAAGITLGMDELYKSGGSPKKKRKV
nCas9-hUNG for ABEmax, SEQ ID NO: 193
MKRTADGSEFESPKKKRKVSGGSSGGSSGSETPGTSESATPESSGGSSGGSDKK
YSIGLAIGTNSVGWAVITDEYKVPSKKFKVLGNTDRHSIKKNLIGALLFDSGETAEAT
RLKRTARRRYTRRKNRICYLQEIFSNEMAKVDDSFFHRLEESFLVEEDKKHERHPIF
GNIVDEVAYHEKYPTIYHLRKKLVDSTDKADLRLIYLALAHMIKFRGHFLIEGDLNPDN
SDVDKLFIQLVQTYNQLFEENPINASGVDAKAILSARLSKSRRLENLIAQLPGEKKNG
LFGNLIALSLGLTPNFKSNFDLAEDAKLQLSKDTYDDDLDNLLAQIGDQYADLFLAAK
NLSDAILLSDILRVNTEITKAPLSASMIKRYDEHHQDLTLLKALVRQQLPEKYKEIFFD
QSKNGYAGYIDGGASQEEFYKFIKPILEKMDGTEELLVKLNREDLLRKQRTFDNGSI
PHQIHLGELHAILRRQEDFYPFLKDNREKIEKILTFRIPYYVGPLARGNSRFAWMTRK
SEETITPWNFEEVVDKGASAQSFIERMTNFDKNLPNEKVLPKHSLLYEYFTVYNELT
KVKYVTEGMRKPAFLSGEQKKAIVDLLFKTNRKVTVKQLKEDYFKKIECFDSVEISG
VEDRFNASLGTYHDLLKIIKDKDFLDNEENEDILEDIVLTLTLFEDREMIEERLKTYAHL
FDDKVMKQLKRRRYTGWGRLSRKLINGIRDKQSGKTILDFLKSDGFANRNFMQLIH
DDSLTFKEDIQKAQVSGQGDSLHEHIANLAGSPAIKKGILQTVKVVDELVKVMGRHK
PENIVIEMARENQTTQKGQKNSRERMKRIEEGIKELGSQILKEHPVENTQLQNEKLY
LYYLQNGRDMYVDQELDINRLSDYDVDHIVPQSFLKDDSIDNKVLTRSDKNRGKSD
NVPSEEVVKKMKNYWRQLLNAKLITQRKFDNLTKAERGGLSELDKAGFIKRQLVET
RQITKHVAQILDSRMNTKYDENDKLIREVKVITLKSKLVSDFRKDFQFYKVREINNYH
HAHDAYLNAVVGTALIKKYPKLESEFVYGDYKVYDVRKMIAKSEQEIGKATAKYFFY
SNIMNFFKTEITLANGEIRKRPLIETNGETGEIVWDKGRDFATVRKVLSMPQVNIVKK
TEVQTGGFSKESILPKRNSDKLIARKKDWDPKKYGGFDSPTVAYSVLVVAKVEKGK
SKKLKSVKELLGITIMERSSFEKNPIDFLEAKGYKEVKKDLIIKLPKYSLFELENGRKR
MLASAGELQKGNELALPSKYVNFLYLASHYEKLKGSPEDNEQKQLFVEQHKHYLDE
IIEQISEFSKRVILADANLDKVLSAYNKHRDKPIREQAENIIHLFTLTNLGAPAAFKYFD
TTIDRKRYTSTKEVLDATLIHQSITGLYETRIDLSQLGGDSGGSGGSGGSIGQKTLYS
FFSPSPARKRHAPSPEPAVQGTGVAGVPEESGDAAAIPAKKAPAGQEEPGTPPSS
PLSAEQLDRIQRNKAAALLRLAARNVPVGFGESWKKHLSGEFGKPYFIKLMGFVAE
ERKHYTVYPPPHQVFTWTQMCDIKDVKVVILGQDPYHGPNQAHGLCFSVQRPVPP
PPSLENIYKELSTDIEDFVHPGHGDLSGWAKQGVLLLNAVLTVRAHQANSHKERGW
EQFTDAVVSWLNQNSNGLVFLLWGSYAQKKGSAIDRKRHHVLQTAHPSPLSVYRG
FFGCRHFSKTNELLQKSGKKPIDWKELSGGSKRTADGSEFEPKKKRKVGSGATNF
SLLKQAGDVEENPGPMVSKGEELFTGVVPILVELDGDVNGHKFSVSGEGEGDATY
GKLTLKFICTTGKLPVPWPTLVTTLTYGVQCFSRYPDHMKQHDFFKSAMPEGYVQE
RTIFFKDDGNYKTRAEVKFEGDTLVNRIELKGIDFKEDGNILGHKLEYNYNSHNVYIM
ADKQKNGIKVNFKIRHNIEDGSVQLADHYQQNTPIGDGPVLLPDNHYLSTQSALSKD
PNEKRDHMVLLEFVTAAGITLGMDELYKSGGSPKKKRKV
hUNG-ABEmax, SEQ ID NO: 194
MKRTADGSEFESPKKKRKVIGQKTLYSFFSPSPARKRHAPSPEPAVQGTGVAGVP
EESGDAAAIPAKKAPAGQEEPGTPPSSPLSAEQLDRIQRNKAAALLRLAARNVPVG
FGESWKKHLSGEFGKPYFIKLMGFVAEERKHYTVYPPPHQVFTWTQMCDIKDVKV
VILGQDPYHGPNQAHGLCFSVQRPVPPPPSLENIYKELSTDIEDFVHPGHGDLSGW
AKQGVLLLNAVLTVRAHQANSHKERGWEQFTDAVVSWLNQNSNGLVFLLWGSYA
QKKGSAIDRKRHHVLQTAHPSPLSVYRGFFGCRHFSKTNELLQKSGKKPIDWKELS
GGSGGSGGSSEVEFSHEYWMRHALTLAKRAWDEREVPVGAVLVHNNRVIGEGW
NRPIGRHDPTAHAEIMALRQGGLVMQNYRLIDATLYVTLEPCVMCAGAMIHSRIGRV
VFGARDAKTGAAGSLMDVLHHPGMNHRVEITEGILADECAALLSDFFRMRRQEIKA
QKKAQSSTDSGGSSGGSSGSETPGTSESATPESSGGSSGGSSEVEFSHEYWMRH
ALTLAKRARDEREVPVGAVLVLNNRVIGEGWNRAIGLHDPTAHAEIMALRQGGLVM
QNYRLIDATLYVTFEPCVMCAGAMIHSRIGRVVFGVRNAKTGAAGSLMDVLHYPGM
NHRVEITEGILADECAALLCYFFRMPRQVFNAQKKAQSSTDSGGSSGGSSGSETPG
TSESATPESSGGSSGGSDKKYSIGLAIGTNSVGWAVITDEYKVPSKKFKVLGNTDR
HSIKKNLIGALLFDSGETAEATRLKRTARRRYTRRKNRICYLQEIFSNEMAKVDDSFF
HRLEESFLVEEDKKHERHPIFGNIVDEVAYHEKYPTIYHLRKKLVDSTDKADLRLIYLA
LAHMIKFRGHFLIEGDLNPDNSDVDKLFIQLVQTYNQLFEENPINASGVDAKAILSAR
LSKSRRLENLIAQLPGEKKNGLFGNLIALSLGLTPNFKSNFDLAEDAKLQLSKDTYDD
DLDNLLAQIGDQYADLFLAAKNLSDAILLSDILRVNTEITKAPLSASMIKRYDEHHQDL
TLLKALVRQQLPEKYKEIFFDQSKNGYAGYIDGGASQEEFYKFIKPILEKMDGTEELL
VKLNREDLLRKQRTFDNGSIPHQIHLGELHAILRRQEDFYPFLKDNREKIEKILTFRIP
YYVGPLARGNSRFAWMTRKSEETITPWNFEEWDKGASAQSFIERMTNFDKNLPN
EKVLPKHSLLYEYFTVYNELTKVKYVTEGMRKPAFLSGEQKKAIVDLLFKTNRKVTV
KQLKEDYFKKIECFDSVEISGVEDRFNASLGTYHDLLKIIKDKDFLDNEENEDILEDIV
LTLTLFEDREMIEERLKTYAHLFDDKVMKQLKRRRYTGWGRLSRKLINGIRDKQSGK
TILDFLKSDGFANRNFMQLIHDDSLTFKEDIQKAQVSGQGDSLHEHIANLAGSPAIKK
GILQTVKWDELVKVMGRHKPENIVIEMARENQTTQKGQKNSRERMKRIEEGIKELG
SQILKEHPVENTQLQNEKLYLYYLQNGRDMYVDQELDINRLSDYDVDHIVPQSFLKD
DSIDNKVLTRSDKNRGKSDNVPSEEVVKKMKNYWRQLLNAKLITQRKFDNLTKAER
GGLSELDKAGFIKRQLVETRQITKHVAQILDSRMNTKYDENDKLIREVKVITLKSKLV
SDFRKDFQFYKVREINNYHHAHDAYLNAVVGTALIKKYPKLESEFVYGDYKVYDVRK
MIAKSEQEIGKATAKYFFYSNIMNFFKTEITLANGEIRKRPLIETNGETGEIVWDKGRD
FATVRKVLSMPQVNIVKKTEVQTGGFSKESILPKRNSDKLIARKKDWDPKKYGGFD
SPTVAYSVLVVAKVEKGKSKKLKSVKELLGITIMERSSFEKNPIDFLEAKGYKEVKKD
LIIKLPKYSLFELENGRKRMLASAGELQKGNELALPSKYVNFLYLASHYEKLKGSPED
NEQKQLFVEQHKHYLDEIIEQISEFSKRVILADANLDKVLSAYNKHRDKPIREQAENII
HLFTLTNLGAPAAFKYFDTTIDRKRYTSTKEVLDATLIHQSITGLYETRIDLSQLGGDS
GGSKRTADGSEFEPKKKRKVGSGATNFSLLKQAGDVEENPGPMVSKGEELFTGVV
PILVELDGDVNGHKFSVSGEGEGDATYGKLTLKFICTTGKLPVPWPTLVTTLTYGVQ
CFSRYPDHMKQHDFFKSAMPEGYVQERTIFFKDDGNYKTRAEVKFEGDTLVNRIEL
KGIDFKEDGNILGHKLEYNYNSHNVYIMADKQKNGIKVNFKIRHNIEDGSVQLADHY
QQNTPIGDGPVLLPDNHYLSTQSALSKDPNEKRDHMVLLEFVTAAGITLGMDELYK
SGGSPKKKRKV
hUNG-miniABEmax(V82G), SEQ ID NO: 195
MKRTADGSEFESPKKKRKVIGQKTLYSFFSPSPARKRHAPSPEPAVQGTGVAGVP
EESGDAAAIPAKKAPAGQEEPGTPPSSPLSAEQLDRIQRNKAAALLRLAARNVPVG
FGESWKKHLSGEFGKPYFIKLMGFVAEERKHYTVYPPPHQVFTWTQMCDIKDVKV
VILGQDPYHGPNQAHGLCFSVQRPVPPPPSLENIYKELSTDIEDFVHPGHGDLSGW
AKQGVLLLNAVLTVRAHQANSHKERGWEQFTDAVVSWLNQNSNGLVFLLWGSYA
QKKGSAIDRKRHHVLQTAHPSPLSVYRGFFGCRHFSKTNELLQKSGKKPIDWKELS
GGSGGSGGSSEVEFSHEYWMRHALTLAKRARDEREVPVGAVLVLNNRVIGEGWN
RAIGLHDPTAHAEIMALRQGGLVMQNYRLIDATLYGTFEPCVMCAGAMIHSRIGRVV
FGVRNAKTGAAGSLMDVLHYPGMNHRVEITEGILADECAALLCYFFRMPRQVFNAQ
KKAQSSTDSGGSSGGSSGSETPGTSESATPESSGGSSGGSDKKYSIGLAIGTNSV
GWAVITDEYKVPSKKFKVLGNTDRHSIKKNLIGALLFDSGETAEATRLKRTARRRYT
RRKNRICYLQEIFSNEMAKVDDSFFHRLEESFLVEEDKKHERHPIFGNIVDEVAYHE
KYPTIYHLRKKLVDSTDKADLRLIYLALAHMIKFRGHFLIEGDLNPDNSDVDKLFIQLV
QTYNQLFEENPINASGVDAKAILSARLSKSRRLENLIAQLPGEKKNGLFGNLIALSLG
LTPNFKSNFDLAEDAKLQLSKDTYDDDLDNLLAQIGDQYADLFLAAKNLSDAILLSDIL
RVNTEITKAPLSASMIKRYDEHHQDLTLLKALVRQQLPEKYKEIFFDQSKNGYAGYID
GGASQEEFYKFIKPILEKMDGTEELLVKLNREDLLRKQRTFDNGSIPHQIHLGELHAI
LRRQEDFYPFLKDNREKIEKILTFRIPYYVGPLARGNSRFAWMTRKSEETITPWNFE
EVVDKGASAQSFIERMTNFDKNLPNEKVLPKHSLLYEYFTVYNELTKVKYVTEGMR
KPAFLSGEQKKAIVDLLFKTNRKVTVKQLKEDYFKKIECFDSVEISGVEDRFNASLGT
YHDLLKIIKDKDFLDNEENEDILEDIVLTLTLFEDREMIEERLKTYAHLFDDKVMKQLK
RRRYTGWGRLSRKLINGIRDKQSGKTILDFLKSDGFANRNFMQLIHDDSLTFKEDIQ
KAQVSGQGDSLHEHIANLAGSPAIKKGILQTVKVVDELVKVMGRHKPENIVIEMARE
NQTTQKGQKNSRERMKRIEEGIKELGSQILKEHPVENTQLQNEKLYLYYLQNGRDM
YVDQELDINRLSDYDVDHIVPQSFLKDDSIDNKVLTRSDKNRGKSDNVPSEEVVKK
MKNYWRQLLNAKLITQRKFDNLTKAERGGLSELDKAGFIKRQLVETRQITKHVAQIL
DSRMNTKYDENDKLIREVKVITLKSKLVSDFRKDFQFYKVREINNYHHAHDAYLNAV
VGTALIKKYPKLESEFVYGDYKVYDVRKMIAKSEQEIGKATAKYFFYSNIMNFFKTEIT
LANGEIRKRPLIETNGETGEIVWDKGRDFATVRKVLSMPQVNIVKKTEVQTGGFSKE
SILPKRNSDKLIARKKDWDPKKYGGFDSPTVAYSVLVVAKVEKGKSKKLKSVKELLG
ITIMERSSFEKNPIDFLEAKGYKEVKKDLIIKLPKYSLFELENGRKRMLASAGELQKGN
ELALPSKYVNFLYLASHYEKLKGSPEDNEQKQLFVEQHKHYLDEIIEQISEFSKRVILA
DANLDKVLSAYNKHRDKPIREQAENIIHLFTLTNLGAPAAFKYFDTTIDRKRYTSTKE
VLDATLIHQSITGLYETRIDLSQLGGDSGGSKRTADGSEFEPKKKRKVGSGATNFSL
LKQAGDVEENPGPMVSKGEELFTGVVPILVELDGDVNGHKFSVSGEGEGDATYGK
LTLKFICTTGKLPVPWPTLVTTLTYGVQCFSRYPDHMKQHDFFKSAMPEGYVQERTI
FFKDDGNYKTRAEVKFEGDTLVNRIELKGIDFKEDGNILGHKLEYNYNSHNVYIMAD
KQKNGIKVNFKIRHNIEDGSVQLADHYQQNTPIGDGPVLLPDNHYLSTQSALSKDPN
EKRDHMVLLEFVTAAGITLGMDELYKSGGSPKKKRKV
hUNG-nCas9 for ABEmax, SEQ ID NO: 196
MKRTADGSEFESPKKKRKVIGQKTLYSFFSPSPARKRHAPSPEPAVQGTGVAGVP
EESGDAAAIPAKKAPAGQEEPGTPPSSPLSAEQLDRIQRNKAAALLRLAARNVPVG
FGESWKKHLSGEFGKPYFIKLMGFVAEERKHYTVYPPPHQVFTWTQMCDIKDVKV
VILGQDPYHGPNQAHGLCFSVQRPVPPPPSLENIYKELSTDIEDFVHPGHGDLSGW
AKQGVLLLNAVLTVRAHQANSHKERGWEQFTDAVVSWLNQNSNGLVFLLWGSYA
QKKGSAIDRKRHHVLQTAHPSPLSVYRGFFGCRHFSKTNELLQKSGKKPIDWKELS
GGSGGSGGSSGGSSGGSSGSETPGTSESATPESSGGSSGGSDKKYSIGLAIGTNS
VGWAVITDEYKVPSKKFKVLGNTDRHSIKKNLIGALLFDSGETAEATRLKRTARRRY
TRRKNRICYLQEIFSNEMAKVDDSFFHRLEESFLVEEDKKHERHPIFGNIVDEVAYH
EKYPTIYHLRKKLVDSTDKADLRLIYLALAHMIKFRGHFLIEGDLNPDNSDVDKLFIQL
VQTYNQLFEENPINASGVDAKAILSARLSKSRRLENLIAQLPGEKKNGLFGNLIALSL
GLTPNFKSNFDLAEDAKLQLSKDTYDDDLDNLLAQIGDQYADLFLAAKNLSDAILLSD
ILRVNTEITKAPLSASMIKRYDEHHQDLTLLKALVRQQLPEKYKEIFFDQSKNGYAGYI
DGGASQEEFYKFIKPILEKMDGTEELLVKLNREDLLRKQRTFDNGSIPHQIHLGELHA
ILRRQEDFYPFLKDNREKIEKILTFRIPYYVGPLARGNSRFAWMTRKSEETITPWNFE
EVVDKGASAQSFIERMTNFDKNLPNEKVLPKHSLLYEYFTVYNELTKVKYVTEGMR
KPAFLSGEQKKAIVDLLFKTNRKVTVKQLKEDYFKKIECFDSVEISGVEDRFNASLGT
YHDLLKIIKDKDFLDNEENEDILEDIVLTLTLFEDREMIEERLKTYAHLFDDKVMKQLK
RRRYTGWGRLSRKLINGIRDKQSGKTILDFLKSDGFANRNFMQLIHDDSLTFKEDIQ
KAQVSGQGDSLHEHIANLAGSPAIKKGILQTVKVVDELVKVMGRHKPENIVIEMARE
NQTTQKGQKNSRERMKRIEEGIKELGSQILKEHPVENTQLQNEKLYLYYLQNGRDM
YVDQELDINRLSDYDVDHIVPQSFLKDDSIDNKVLTRSDKNRGKSDNVPSEEVVKK
MKNYWRQLLNAKLITQRKFDNLTKAERGGLSELDKAGFIKRQLVETRQITKHVAQIL
DSRMNTKYDENDKLIREVKVITLKSKLVSDFRKDFQFYKVREINNYHHAHDAYLNAV
VGTALIKKYPKLESEFVYGDYKVYDVRKMIAKSEQEIGKATAKYFFYSNIMNFFKTEIT
LANGEIRKRPLIETNGETGEIVWDKGRDFATVRKVLSMPQVNIVKKTEVQTGGFSKE
SILPKRNSDKLIARKKDWDPKKYGGFDSPTVAYSVLVVAKVEKGKSKKLKSVKELLG
ITIMERSSFEKNPIDFLEAKGYKEVKKDLIIKLPKYSLFELENGRKRMLASAGELQKGN
ELALPSKYVNFLYLASHYEKLKGSPEDNEQKQLFVEQHKHYLDEIIEQISEFSKRVILA
DANLDKVLSAYNKHRDKPIREQAENIIHLFTLTNLGAPAAFKYFDTTIDRKRYTSTKE
VLDATLIHQSITGLYETRIDLSQLGGDSGGSKRTADGSEFEPKKKRKVGSGATNFSL
LKQAGDVEENPGPMVSKGEELFTGVVPILVELDGDVNGHKFSVSGEGEGDATYGK
LTLKFICTTGKLPVPWPTLVTTLTYGVQCFSRYPDHMKQHDFFKSAMPEGYVQERTI
FFKDDGNYKTRAEVKFEGDTLVNRIELKGIDFKEDGNILGHKLEYNYNSHNVYIMAD
KQKNGIKVNFKIRHNIEDGSVQLADHYQQNTPIGDGPVLLPDNHYLSTQSALSKDPN
EKRDHMVLLEFVTAAGITLGMDELYKSGGSPKKKRKV
ABEmax-UGI, SEQ ID NO: 197
MKRTADGSEFESPKKKRKVSEVEFSHEYWMRHALTLAKRAWDEREVPVGAVLVH
NNRVIGEGWNRPIGRHDPTAHAEIMALRQGGLVMQNYRLIDATLYVTLEPCVMCAG
AMIHSRIGRVVFGARDAKTGAAGSLMDVLHHPGMNHRVEITEGILADECAALLSDFF
RMRRQEIKAQKKAQSSTDSGGSSGGSSGSETPGTSESATPESSGGSSGGSSEVE
FSHEYWMRHALTLAKRARDEREVPVGAVLVLNNRVIGEGWNRAIGLHDPTAHAEIM
ALRQGGLVMQNYRLIDATLYVTFEPCVMCAGAMIHSRIGRVVFGVRNAKTGAAGSL
MDVLHYPGMNHRVEITEGILADECAALLCYFFRMPRQVFNAQKKAQSSTDSGGSS
GGSSGSETPGTSESATPESSGGSSGGSDKKYSIGLAIGTNSVGWAVITDEYKVPSK
KFKVLGNTDRHSIKKNLIGALLFDSGETAEATRLKRTARRRYTRRKNRICYLQEIFSN
EMAKVDDSFFHRLEESFLVEEDKKHERHPIFGNIVDEVAYHEKYPTIYHLRKKLVDS
TDKADLRLIYLALAHMIKFRGHFLIEGDLNPDNSDVDKLFIQLVQTYNQLFEENPINAS
GVDAKAILSARLSKSRRLENLIAQLPGEKKNGLFGNLIALSLGLTPNFKSNFDLAEDA
KLQLSKDTYDDDLDNLLAQIGDQYADLFLAAKNLSDAILLSDILRVNTEITKAPLSASM
IKRYDEHHQDLTLLKALVRQQLPEKYKEIFFDQSKNGYAGYIDGGASQEEFYKFIKPI
LEKMDGTEELLVKLNREDLLRKQRTFDNGSIPHQIHLGELHAILRRQEDFYPFLKDN
REKIEKILTFRIPYYVGPLARGNSRFAWMTRKSEETITPWNFEEVVDKGASAQSFIER
MTNFDKNLPNEKVLPKHSLLYEYFTVYNELTKVKYVTEGMRKPAFLSGEQKKAIVDL
LFKTNRKVTVKQLKEDYFKKIECFDSVEISGVEDRFNASLGTYHDLLKIIKDKDFLDN
EENEDILEDIVLTLTLFEDREMIEERLKTYAHLFDDKVMKQLKRRRYTGWGRLSRKLI
NGIRDKQSGKTILDFLKSDGFANRNFMQLIHDDSLTFKEDIQKAQVSGQGDSLHEHI
ANLAGSPAIKKGILQTVKVVDELVKVMGRHKPENMEMARENQTTQKGQKNSRER
MKRIEEGIKELGSQILKEHPVENTQLQNEKLYLYYLQNGRDMYVDQELDINRLSDYD
VDHIVPQSFLKDDSIDNKVLTRSDKNRGKSDNVPSEEVVKKMKNYWRQLLNAKLIT
QRKFDNLTKAERGGLSELDKAGFIKRQLVETRQITKHVAQILDSRMNTKYDENDKLI
REVKVITLKSKLVSDFRKDFQFYKVREINNYHHAHDAYLNAVVGTALIKKYPKLESEF
VYGDYKVYDVRKMIAKSEQEIGKATAKYFFYSNIMNFFKTEITLANGEIRKRPLIETNG
ETGEIVWDKGRDFATVRKVLSMPQVNIVKKTEVQTGGFSKESILPKRNSDKLIARKK
DWDPKKYGGFDSPTVAYSVLVVAKVEKGKSKKLKSVKELLGITIMERSSFEKNPIDF
LEAKGYKEVKKDLIIKLPKYSLFELENGRKRMLASAGELQKGNELALPSKYVNFLYLA
SHYEKLKGSPEDNEQKQLFVEQHKHYLDEIIEQISEFSKRVILADANLDKVLSAYNKH
RDKPIREQAENIIHLFTLTNLGAPAAFKYFDTTIDRKRYTSTKEVLDATLIHQSITGLYE
TRIDLSQLGGDSGGSGGSGGSTNLSDIIEKETGKQLVIQESILMLPEEVEEVIGNKPE
SDILVHTAYDESTDENVMLLTSDAPEYKPWALVIQDSNGENKIKMLSGGSGGSGGS
TNLSDIIEKETGKQLVIQESILMLPEEVEEVIGNKPESDILVHTAYDESTDENVMLLTS
DAPEYKPWALVIQDSNGENKIKMLSGGSKRTADGSEFEPKKKRKVGSGATNFSLLK
QAGDVEENPGPMVSKGEELFTGVVPILVELDGDVNGHKFSVSGEGEGDATYGKLT
LKFICTTGKLPVPWPTLVTTLTYGVQCFSRYPDHMKQHDFFKSAMPEGYVQERTIF
FKDDGNYKTRAEVKFEGDTLVNRIELKGIDFKEDGNILGHKLEYNYNSHNVYIMADK
QKNGIKVNFKIRHNIEDGSVQLADHYQQNTPIGDGPVLLPDNHYLSTQSALSKDPNE
KRDHMVLLEFVTAAGITLGMDELYKSGGSPKKKRKV
miniABEmax(V82G)-UGI, SEQ ID NO: 198
MKRTADGSEFESPKKKRKVSEVEFSHEYWMRHALTLAKRARDEREVPVGAVLVLN
NRVIGEGWNRAIGLHDPTAHAEIMALRQGGLVMQNYRLIDATLYGTFEPCVMCAGA
MIHSRIGRVVFGVRNAKTGAAGSLMDVLHYPGMNHRVEITEGILADECAALLCYFFR
MPRQVFNAQKKAQSSTDSGGSSGGSSGSETPGTSESATPESSGGSSGGSDKKYS
IGLAIGTNSVGWAVITDEYKVPSKKFKVLGNTDRHSIKKNLIGALLFDSGETAEATRL
KRTARRRYTRRKNRICYLQEIFSNEMAKVDDSFFHRLEESFLVEEDKKHERHPIFGN
IVDEVAYHEKYPTIYHLRKKLVDSTDKADLRLIYLALAHMIKFRGHFLIEGDLNPDNSD
VDKLFIQLVQTYNQLFEENPINASGVDAKAILSARLSKSRRLENLIAQLPGEKKNGLF
GNLIALSLGLTPNFKSNFDLAEDAKLQLSKDTYDDDLDNLLAQIGDQYADLFLAAKNL
SDAILLSDILRVNTEITKAPLSASMIKRYDEHHQDLTLLKALVRQQLPEKYKEIFFDQS
KNGYAGYIDGGASQEEFYKFIKPILEKMDGTEELLVKLNREDLLRKQRTFDNGSIPH
QIHLGELHAILRRQEDFYPFLKDNREKIEKILTFRIPYYVGPLARGNSRFAWMTRKSE
ETITPWNFEEVVDKGASAQSFIERMTNFDKNLPNEKVLPKHSLLYEYFTVYNELTKV
KYVTEGMRKPAFLSGEQKKAIVDLLFKTNRKVTVKQLKEDYFKKIECFDSVEISGVE
DRFNASLGTYHDLLKIIKDKDFLDNEENEDILEDIVLTLTLFEDREMIEERLKTYAHLFD
DKVMKQLKRRRYTGWGRLSRKLINGIRDKQSGKTILDFLKSDGFANRNFMQLIHDD
SLTFKEDIQKAQVSGQGDSLHEHIANLAGSPAIKKGILQTVKVVDELVKVMGRHKPE
NIVIEMARENQTTQKGQKNSRERMKRIEEGIKELGSQILKEHPVENTQLQNEKLYLY
YLQNGRDMYVDQELDINRLSDYDVDHIVPQSFLKDDSIDNKVLTRSDKNRGKSDNV
PSEEVVKKMKNYWRQLLNAKLITQRKFDNLTKAERGGLSELDKAGFIKRQLVETRQI
TKHVAQILDSRMNTKYDENDKLIREVKVITLKSKLVSDFRKDFQFYKVREINNYHHAH
DAYLNAVVGTALIKKYPKLESEFVYGDYKVYDVRKMIAKSEQEIGKATAKYFFYSNIM
NFFKTEITLANGEIRKRPLIETNGETGEIVWDKGRDFATVRKVLSMPQVNIVKKTEVQ
TGGFSKESILPKRNSDKLIARKKDWDPKKYGGFDSPTVAYSVLWAKVEKGKSKKL
KSVKELLGITIMERSSFEKNPIDFLEAKGYKEVKKDLIIKLPKYSLFELENGRKRMLAS
AGELQKGNELALPSKYVNFLYLASHYEKLKGSPEDNEQKQLFVEQHKHYLDEIIEQI
SEFSKRVILADANLDKVLSAYNKHRDKPIREQAENIIHLFTLTNLGAPAAFKYFDTTID
RKRYTSTKEVLDATLIHQSITGLYETRIDLSQLGGDSGGSGGSGGSTNLSDIIEKETG
KQLVIQESILMLPEEVEEVIGNKPESDILVHTAYDESTDENVMLLTSDAPEYKPWALV
IQDSNGENKIKMLSGGSGGSGGSTNLSDIIEKETGKQLVIQESILMLPEEVEEVIGNK
PESDILVHTAYDESTDENVMLLTSDAPEYKPWALVIQDSNGENKIKMLSGGSKRTAD
GSEFEPKKKRKVGSGATNFSLLKQAGDVEENPGPMVSKGEELFTGVVPILVELDGD
VNGHKFSVSGEGEGDATYGKLTLKFICTTGKLPVPWPTLVTTLTYGVQCFSRYPDH
MKQHDFFKSAMPEGYVQERTIFFKDDGNYKTRAEVKFEGDTLVNRIELKGIDFKED
GNILGHKLEYNYNSHNVYIMADKQKNGIKVNFKIRHNIEDGSVQLADHYQQNTPIGD
GPVLLPDNHYLSTQSALSKDPNEKRDHMVLLEFVTAAGITLGMDELYKSGGSPKKK
RKV
nCas9-UGI for ABEmax, SEQ ID NO: 199
MKRTADGSEFESPKKKRKVSGGSSGGSSGSETPGTSESATPESSGGSSGGSDKK
YSIGLAIGTNSVGWAVITDEYKVPSKKFKVLGNTDRHSIKKNLIGALLFDSGETAEAT
RLKRTARRRYTRRKNRICYLQEIFSNEMAKVDDSFFHRLEESFLVEEDKKHERHPIF
GNIVDEVAYHEKYPTIYHLRKKLVDSTDKADLRLIYLALAHMIKFRGHFLIEGDLNPDN
SDVDKLFIQLVQTYNQLFEENPINASGVDAKAILSARLSKSRRLENLIAQLPGEKKNG
LFGNLIALSLGLTPNFKSNFDLAEDAKLQLSKDTYDDDLDNLLAQIGDQYADLFLAAK
NLSDAILLSDILRVNTEITKAPLSASMIKRYDEHHQDLTLLKALVRQQLPEKYKEIFFD
QSKNGYAGYIDGGASQEEFYKFIKPILEKMDGTEELLVKLNREDLLRKQRTFDNGSI
PHQIHLGELHAILRRQEDFYPFLKDNREKIEKILTFRIPYYVGPLARGNSRFAWMTRK
SEETITPWNFEEWDKGASAQSFIERMTNFDKNLPNEKVLPKHSLLYEYFTVYNELT
KVKYVTEGMRKPAFLSGEQKKAIVDLLFKTNRKVTVKQLKEDYFKKIECFDSVEISG
VEDRFNASLGTYHDLLKIIKDKDFLDNEENEDILEDIVLTLTLFEDREMIEERLKTYAHL
FDDKVMKQLKRRRYTGWGRLSRKLINGIRDKQSGKTILDFLKSDGFANRNFMQLIH
DDSLTFKEDIQKAQVSGQGDSLHEHIANLAGSPAIKKGILQTVKVVDELVKVMGRHK
PENIVIEMARENQTTQKGQKNSRERMKRIEEGIKELGSQILKEHPVENTQLQNEKLY
LYYLQNGRDMYVDQELDINRLSDYDVDHIVPQSFLKDDSIDNKVLTRSDKNRGKSD
NVPSEEVVKKMKNYWRQLLNAKLITQRKFDNLTKAERGGLSELDKAGFIKRQLVET
RQITKHVAQILDSRMNTKYDENDKLIREVKVITLKSKLVSDFRKDFQFYKVREINNYH
HAHDAYLNAVVGTALIKKYPKLESEFVYGDYKVYDVRKMIAKSEQEIGKATAKYFFY
SNIMNFFKTEITLANGEIRKRPLIETNGETGEIVWDKGRDFATVRKVLSMPQVNIVKK
TEVQTGGFSKESILPKRNSDKLIARKKDWDPKKYGGFDSPTVAYSVLVVAKVEKGK
SKKLKSVKELLGITIMERSSFEKNPIDFLEAKGYKEVKKDLIIKLPKYSLFELENGRKR
MLASAGELQKGNELALPSKYVNFLYLASHYEKLKGSPEDNEQKQLFVEQHKHYLDE
IIEQISEFSKRVILADANLDKVLSAYNKHRDKPIREQAENIIHLFTLTNLGAPAAFKYFD
TTIDRKRYTSTKEVLDATLIHQSITGLYETRIDLSQLGGDSGGSGGSGGSTNLSDIIEK
ETGKQLVIQESILMLPEEVEEVIGNKPESDILVHTAYDESTDENVMLLTSDAPEYKPW
ALVIQDSNGENKIKMLSGGSGGSGGSTNLSDIIEKETGKQLVIQESILMLPEEVEEVI
GNKPESDILVHTAYDESTDENVMLLTSDAPEYKPWALVIQDSNGENKIKMLSGGSK
RTADGSEFEPKKKRKVGSGATNFSLLKQAGDVEENPGPMVSKGEELFTGVVPILVE
LDGDVNGHKFSVSGEGEGDATYGKLTLKFICTTGKLPVPWPTLVTTLTYGVQCFSR
YPDHMKQHDFFKSAMPEGYVQERTIFFKDDGNYKTRAEVKFEGDTLVNRIELKGID
FKEDGNILGHKLEYNYNSHNVYIMADKQKNGIKVNFKIRHNIEDGSVQLADHYQQNT
PIGDGPVLLPDNHYLSTQSALSKDPNEKRDHMVLLEFVTAAGITLGMDELYKSGGS
PKKKRKV
REV1 (human) amino acid sequence, SEQ ID NO: 200
MRRGGWRKRAENDGWETWGGYMAAKVQKLEEQFRSDAAMQKDGTSSTIFSGVA
IYVNGYTDPSAEELRKLMMLHGGQYHVYYSRSKTTHIIATNLPNAKIKELKGEKVIRP
EWIVESIKAGRLLSYIPYQLYTKQSSVQKGLSFNPVCRPEDPLPGPSNIAKQLNNRV
NHIVKKIETENEVKVNGMNSWNEEDENNDFSFVDLEQTSPGRKQNGIPHPRGSTAI
FNGHTPSSNGALKTQDCLVPMVNSVASRLSPAFSQEEDKAEKSSTDFRDCTLQQL
QQSTRNTDALRNPHRTNSFSLSPLHSNTKINGAHHSTVQGPSSTKSTSSVSTFSKA
APSVPSKPSDCNFISNFYSHSRLHHISMWKCELTEFVNTLQRQSNGIFPGREKLKK
MKTGRSALVVTDTGDMSVLNSPRHQSCIMHVDMDCFFVSVGIRNRPDLKGKPVAV
TSNRGTGRAPLRPGANPQLEWQYYQNKILKGKAADIPDSSLWENPDSAQANGIDS
VLSRAEIASCSYEARQLGIKNGMFFGHAKQLCPNLQAVPYDFHAYKEVAQTLYETLA
SYTHNIEAVSCDEALVDITEILAETKLTPDEFANAVRMEIKDQTKCAASVGIGSNILLA
RMATRKAKPDGQYHLKPEEVDDFIRGQLVTNLPGVGHSMESKLASLGIKTCGDLQY
MTMAKLQKEFGPKTGQMLYRFCRGLDDRPVRTEKERKSVSAEINYGIRFTQPKEAE
AFLLSLSEEIQRRLEATGMKGKRLTLKIMVRKPGAPVETAKFGGHGICDNIARTVTLD
QATDNAKIIGKAMLNMFHTMKLNISDMRGVGIHVNQLVPTNLNPSTCPSRPSVQSS
HFPSGSYSVRDVFQVQKAKKSTEEEHKEVFRAAVDLEISSASRTCTFLPPFPAHLPT
SPDTNKAESSGKWNGLHTPVSVQSRLNLSIEVPSPSQLDQSVLEALPPDLREQVEQ
VCAVQQAESHGDKKKEPVNGCNTGILPQPVGTVLLQIPEPQESNSDAGINLIALPAF
SQVDPEVFAALPAELQRELKAAYDQRQRQGENSTHQQSASASVPKNPLLHLKAAV
KEKKRNKKKKTIGSPKRIQSPLNNKLLNSPAKTLPGACGSPQKLIDGFLKHEGPPAE
KPLEELSASTSGVPGLSSLQSDPAGCVRPPAPNLAGAVEFNDVKTLLREWITTISDP
MEEDILQVVKYCTDLIEEKDLEKLDLVIKYMKRLMQQSVESVWNMAFDFILDNVQVV
LQQTYGSTLKVT
BE4max-REV1, SEQ ID NO: 201
MKRTADGSEFESPKKKRKVSSETGPVAVDPTLRRRIEPHEFEVFFDPRELRKETCL
LYEINWGGRHSIWRHTSQNTNKHVEVNFIEKFTTERYFCPNTRCSITWFLSWSPCG
ECSRAITEFLSRYPHVTLFIYIARLYHHADPRNRQGLRDLISSGVTIQIMTEQESGYC
WRNFVNYSPSNEAHWPRYPHLWVRLYVLELYCIILGLPPCLNILRRKQPQLTFFTIAL
QSCHYQRLPPHILWATGLKSGGSSGGSSGSETPGTSESATPESSGGSSGGSDKKY
SIGLAIGTNSVGWAVITDEYKVPSKKFKVLGNTDRHSIKKNLIGALLFDSGETAEATR
LKRTARRRYTRRKNRICYLQEIFSNEMAKVDDSFFHRLEESFLVEEDKKHERHPIFG
NIVDEVAYHEKYPTIYHLRKKLVDSTDKADLRLIYLALAHMIKFRGHFLIEGDLNPDNS
DVDKLFIQLVQTYNQLFEENPINASGVDAKAILSARLSKSRRLENLIAQLPGEKKNGL
FGNLIALSLGLTPNFKSNFDLAEDAKLQLSKDTYDDDLDNLLAQIGDQYADLFLAAKN
LSDAILLSDILRVNTEITKAPLSASMIKRYDEHHQDLTLLKALVRQQLPEKYKEIFFDQ
SKNGYAGYIDGGASQEEFYKFIKPILEKMDGTEELLVKLNREDLLRKQRTFDNGSIP
HQIHLGELHAILRRQEDFYPFLKDNREKIEKILTFRIPYYVGPLARGNSRFAWMTRKS
EETITPWNFEEVVDKGASAQSFIERMTNFDKNLPNEKVLPKHSLLYEYFTVYNELTK
VKYVTEGMRKPAFLSGEQKKAIVDLLFKTNRKVTVKQLKEDYFKKIECFDSVEISGV
EDRFNASLGTYHDLLKIIKDKDFLDNEENEDILEDIVLTLTLFEDREMIEERLKTYAHLF
DDKVMKQLKRRRYTGWGRLSRKLINGIRDKQSGKTILDFLKSDGFANRNFMQLIHD
DSLTFKEDIQKAQVSGQGDSLHEHIANLAGSPAIKKGILQTVKVVDELVKVMGRHKP
ENIVIEMARENQTTQKGQKNSRERMKRIEEGIKELGSQILKEHPVENTQLQNEKLYL
YYLQNGRDMYVDQELDINRLSDYDVDHIVPQSFLKDDSIDNKVLTRSDKNRGKSDN
VPSEEVVKKMKNYWRQLLNAKLITQRKFDNLTKAERGGLSELDKAGFIKRQLVETR
QITKHVAQILDSRMNTKYDENDKLIREVKVITLKSKLVSDFRKDFQFYKVREINNYHH
AHDAYLNAVVGTALIKKYPKLESEFVYGDYKVYDVRKMIAKSEQEIGKATAKYFFYS
NIMNFFKTEITLANGEIRKRPLIETNGETGEIVWDKGRDFATVRKVLSMPQVNIVKKT
EVQTGGFSKESILPKRNSDKLIARKKDWDPKKYGGFDSPTVAYSVLVVAKVEKGKS
KKLKSVKELLGITIMERSSFEKNPIDFLEAKGYKEVKKDLIIKLPKYSLFELENGRKRM
LASAGELQKGNELALPSKYVNFLYLASHYEKLKGSPEDNEQKQLFVEQHKHYLDEII
EQISEFSKRVILADANLDKVLSAYNKHRDKPIREQAENIIHLFTLTNLGAPAAFKYFDT
TIDRKRYTSTKEVLDATLIHQSITGLYETRIDLSQLGGDSGGSRRGGWRKRAENDG
WETWGGYMAAKVQKLEEQFRSDAAMQKDGTSSTIFSGVAIYVNGYTDPSAEELRK
LMMLHGGQYHVYYSRSKTTHIIATNLPNAKIKELKGEKVIRPEWIVESIKAGRLLSYIP
YQLYTKQSSVQKGLSFNPVCRPEDPLPGPSNIAKQLNNRVNHIVKKIETENEVKVNG
MNSWNEEDENNDFSFVDLEQTSPGRKQNGIPHPRGSTAIFNGHTPSSNGALKTQD
CLVPMVNSVASRLSPAFSQEEDKAEKSSTDFRDCTLQQLQQSTRNTDALRNPHRT
NSFSLSPLHSNTKINGAHHSTVQGPSSTKSTSSVSTFSKAAPSVPSKPSDCNFISNF
YSHSRLHHISMWKCELTEFVNTLQRQSNGIFPGREKLKKMKTGRSALVVTDTGDMS
VLNSPRHQSCIMHVDMDCFFVSVGIRNRPDLKGKPVAVTSNRGTGRAPLRPGANP
QLEWQYYQNKILKGKAADIPDSSLWENPDSAQANGIDSVLSRAEIASCSYEARQLGI
KNGMFFGHAKQLCPNLQAVPYDFHAYKEVAQTLYETLASYTHNIEAVSCDEALVDIT
EILAETKLTPDEFANAVRMEIKDQTKCAASVGIGSNILLARMATRKAKPDGQYHLKPE
EVDDFIRGQLVTNLPGVGHSMESKLASLGIKTCGDLQYMTMAKLQKEFGPKTGQML
YRFCRGLDDRPVRTEKERKSVSAEINYGIRFTQPKEAEAFLLSLSEEIQRRLEATGM
KGKRLTLKIMVRKPGAPVETAKFGGHGICDNIARTVTLDQATDNAKIIGKAMLNMFH
TMKLNISDMRGVGIHVNQLVPTNLNPSTCPSRPSVQSSHFPSGSYSVRDVFQVQKA
KKSTEEEHKEVFRAAVDLEISSASRTCTFLPPFPAHLPTSPDTNKAESSGKWNGLHT
PVSVQSRLNLSIEVPSPSQLDQSVLEALPPDLREQVEQVCAVQQAESHGDKKKEPV
NGCNTGILPQPVGTVLLQIPEPQESNSDAGINLIALPAFSQVDPEVFAALPAELQREL
KAAYDQRQRQGENSTHQQSASASVPKNPLLHLKAAVKEKKRNKKKKTIGSPKRIQS
PLNNKLLNSPAKTLPGACGSPQKLIDGFLKHEGPPAEKPLEELSASTSGVPGLSSLQ
SDPAGCVRPPAPNLAGAVEFNDVKTLLREWITTISDPMEEDILQVVKYCTDLIEEKDL
EKLDLVIKYMKRLMQQSVESVWNMAFDFILDNVQVVLQQTYGSTLKVTSGGSKRTA
DGSEFEPKKKRKVGGGGSGATNFSLLKQAGDVEENPGPMVSKGEELFTGVVPILV
ELDGDVNGHKFSVSGEGEGDATYGKLTLKFICTTGKLPVPWPTLVTTLTYGVQCFS
RYPDHMKQHDFFKSAMPEGYVQERTIFFKDDGNYKTRAEVKFEGDTLVNRIELKGI
DFKEDGNILGHKLEYNYNSHNVYIMADKQKNGIKVNFKIRHNIEDGSVQLADHYQQN
TPIGDGPVLLPDNHYLSTQSALSKDPNEKRDHMVLLEFVTAAGITLGMDELYK
BE4max-REV1-eUNG, SEQ ID NO: 202
MKRTADGSEFESPKKKRKVSSETGPVAVDPTLRRRIEPHEFEVFFDPRELRKETCL
LYEINWGGRHSIWRHTSQNTNKHVEVNFIEKFTTERYFCPNTRCSITWFLSWSPCG
ECSRAITEFLSRYPHVTLFIYIARLYHHADPRNRQGLRDLISSGVTIQIMTEQESGYC
WRNFVNYSPSNEAHWPRYPHLWVRLYVLELYCIILGLPPCLNILRRKQPQLTFFTIAL
QSCHYQRLPPHILWATGLKSGGSSGGSSGSETPGTSESATPESSGGSSGGSDKKY
SIGLAIGTNSVGWAVITDEYKVPSKKFKVLGNTDRHSIKKNLIGALLFDSGETAEATR
LKRTARRRYTRRKNRICYLQEIFSNEMAKVDDSFFHRLEESFLVEEDKKHERHPIFG
NIVDEVAYHEKYPTIYHLRKKLVDSTDKADLRLIYLALAHMIKFRGHFLIEGDLNPDNS
DVDKLFIQLVQTYNQLFEENPINASGVDAKAILSARLSKSRRLENLIAQLPGEKKNGL
FGNLIALSLGLTPNFKSNFDLAEDAKLQLSKDTYDDDLDNLLAQIGDQYADLFLAAKN
LSDAILLSDILRVNTEITKAPLSASMIKRYDEHHQDLTLLKALVRQQLPEKYKEIFFDQ
SKNGYAGYIDGGASQEEFYKFIKPILEKMDGTEELLVKLNREDLLRKQRTFDNGSIP
HQIHLGELHAILRRQEDFYPFLKDNREKIEKILTFRIPYYVGPLARGNSRFAWMTRKS
EETITPWNFEEVVDKGASAQSFIERMTNFDKNLPNEKVLPKHSLLYEYFTVYNELTK
VKYVTEGMRKPAFLSGEQKKAIVDLLFKTNRKVTVKQLKEDYFKKIECFDSVEISGV
EDRFNASLGTYHDLLKIIKDKDFLDNEENEDILEDIVLTLTLFEDREMIEERLKTYAHLF
DDKVMKQLKRRRYTGWGRLSRKLINGIRDKQSGKTILDFLKSDGFANRNFMQLIHD
DSLTFKEDIQKAQVSGQGDSLHEHIANLAGSPAIKKGILQTVKVVDELVKVMGRHKP
ENIVIEMARENQTTQKGQKNSRERMKRIEEGIKELGSQILKEHPVENTQLQNEKLYL
YYLQNGRDMYVDQELDINRLSDYDVDHIVPQSFLKDDSIDNKVLTRSDKNRGKSDN
VPSEEVVKKMKNYWRQLLNAKLITQRKFDNLTKAERGGLSELDKAGFIKRQLVETR
QITKHVAQILDSRMNTKYDENDKLIREVKVITLKSKLVSDFRKDFQFYKVREINNYHH
AHDAYLNAVVGTALIKKYPKLESEFVYGDYKVYDVRKMIAKSEQEIGKATAKYFFYS
NIMNFFKTEITLANGEIRKRPLIETNGETGEIVWDKGRDFATVRKVLSMPQVNIVKKT
EVQTGGFSKESILPKRNSDKLIARKKDWDPKKYGGFDSPTVAYSVLVVAKVEKGKS
KKLKSVKELLGITIMERSSFEKNPIDFLEAKGYKEVKKDLIIKLPKYSLFELENGRKRM
LASAGELQKGNELALPSKYVNFLYLASHYEKLKGSPEDNEQKQLFVEQHKHYLDEII
EQISEFSKRVILADANLDKVLSAYNKHRDKPIREQAENIIHLFTLTNLGAPAAFKYFDT
TIDRKRYTSTKEVLDATLIHQSITGLYETRIDLSQLGGDSGGSRRGGWRKRAENDG
WETWGGYMAAKVQKLEEQFRSDAAMQKDGTSSTIFSGVAIYVNGYTDPSAEELRK
LMMLHGGQYHVYYSRSKTTHIIATNLPNAKIKELKGEKVIRPEWIVESIKAGRLLSYIP
YQLYTKQSSVQKGLSFNPVCRPEDPLPGPSNIAKQLNNRVNHIVKKIETENEVKVNG
MNSWNEEDENNDFSFVDLEQTSPGRKQNGIPHPRGSTAIFNGHTPSSNGALKTQD
CLVPMVNSVASRLSPAFSQEEDKAEKSSTDFRDCTLQQLQQSTRNTDALRNPHRT
NSFSLSPLHSNTKINGAHHSTVQGPSSTKSTSSVSTFSKAAPSVPSKPSDCNFISNF
YSHSRLHHISMWKCELTEFVNTLQRQSNGIFPGREKLKKMKTGRSALVVTDTGDMS
VLNSPRHQSCIMHVDMDCFFVSVGIRNRPDLKGKPVAVTSNRGTGRAPLRPGANP
QLEWQYYQNKILKGKAADIPDSSLWENPDSAQANGIDSVLSRAEIASCSYEARQLGI
KNGMFFGHAKQLCPNLQAVPYDFHAYKEVAQTLYETLASYTHNIEAVSCDEALVDIT
EILAETKLTPDEFANAVRMEIKDQTKCAASVGIGSNILLARMATRKAKPDGQYHLKPE
EVDDFIRGQLVTNLPGVGHSMESKLASLGIKTCGDLQYMTMAKLQKEFGPKTGQML
YRFCRGLDDRPVRTEKERKSVSAEINYGIRFTQPKEAEAFLLSLSEEIQRRLEATGM
KGKRLTLKIMVRKPGAPVETAKFGGHGICDNIARTVTLDQATDNAKIIGKAMLNMFH
TMKLNISDMRGVGIHVNQLVPTNLNPSTCPSRPSVQSSHFPSGSYSVRDVFQVQKA
KKSTEEEHKEVFRAAVDLEISSASRTCTFLPPFPAHLPTSPDTNKAESSGKWNGLHT
PVSVQSRLNLSIEVPSPSQLDQSVLEALPPDLREQVEQVCAVQQAESHGDKKKEPV
NGCNTGILPQPVGTVLLQIPEPQESNSDAGINLIALPAFSQVDPEVFAALPAELQREL
KAAYDQRQRQGENSTHQQSASASVPKNPLLHLKAAVKEKKRNKKKKTIGSPKRIQS
PLNNKLLNSPAKTLPGACGSPQKLIDGFLKHEGPPAEKPLEELSASTSGVPGLSSLQ
SDPAGCVRPPAPNLAGAVEFNDVKTLLREWITTISDPMEEDILQVVKYCTDLIEEKDL
EKLDLVIKYMKRLMQQSVESVWNMAFDFILDNVQVVLQQTYGSTLKVTSGGSGGS
GGSANELTWHDVLAEEKQQPYFLNTLQTVASERQSGVTIYPPQKDVFNAFRFTELG
DVKVVILGQDPYHGPGQAHGLAFSVRPGIAIPPSLLNMYKELENTIPGFTRPNHGYL
ESWARQGVLLLNTVLTVRAGQAHSHASLGWETFTDKVISLINQHREGVVFLLWGSH
AQKKGAIIDKQRHHVLKAPHPSPLSAHRGFFGCNHFVLANQWLEQRGETPIDWMP
VLPAESESGGSKRTADGSEFEPKKKRKVGGGGSGATNFSLLKQAGDVEENPGPM
VSKGEELFTGVVPILVELDGDVNGHKFSVSGEGEGDATYGKLTLKFICTTGKLPVPW
PTLVTTLTYGVQCFSRYPDHMKQHDFFKSAMPEGYVQERTIFFKDDGNYKTRAEVK
FEGDTLVNRIELKGIDFKEDGNILGHKLEYNYNSHNVYIMADKQKNGIKVNFKIRHNIE
DGSVQLADHYQQNTPIGDGPVLLPDNHYLSTQSALSKDPNEKRDHMVLLEFVTAAG
ITLGMDELYK
BE4max-REV1-hUNG, SEQ ID NO: 203
MKRTADGSEFESPKKKRKVSSETGPVAVDPTLRRRIEPHEFEVFFDPRELRKETCL
LYEINWGGRHSIWRHTSQNTNKHVEVNFIEKFTTERYFCPNTRCSITWFLSWSPCG
ECSRAITEFLSRYPHVTLFIYIARLYHHADPRNRQGLRDLISSGVTIQIMTEQESGYC
WRNFVNYSPSNEAHWPRYPHLWVRLYVLELYCIILGLPPCLNILRRKQPQLTFFTIAL
QSCHYQRLPPHILWATGLKSGGSSGGSSGSETPGTSESATPESSGGSSGGSDKKY
SIGLAIGTNSVGWAVITDEYKVPSKKFKVLGNTDRHSIKKNLIGALLFDSGETAEATR
LKRTARRRYTRRKNRICYLQEIFSNEMAKVDDSFFHRLEESFLVEEDKKHERHPIFG
NIVDEVAYHEKYPTIYHLRKKLVDSTDKADLRLIYLALAHMIKFRGHFLIEGDLNPDNS
DVDKLFIQLVQTYNQLFEENPINASGVDAKAILSARLSKSRRLENLIAQLPGEKKNGL
FGNLIALSLGLTPNFKSNFDLAEDAKLQLSKDTYDDDLDNLLAQIGDQYADLFLAAKN
LSDAILLSDILRVNTEITKAPLSASMIKRYDEHHQDLTLLKALVRQQLPEKYKEIFFDQ
SKNGYAGYIDGGASQEEFYKFIKPILEKMDGTEELLVKLNREDLLRKQRTFDNGSIP
HQIHLGELHAILRRQEDFYPFLKDNREKIEKILTFRIPYYVGPLARGNSRFAWMTRKS
EETITPWNFEEVVDKGASAQSFIERMTNFDKNLPNEKVLPKHSLLYEYFTVYNELTK
VKYVTEGMRKPAFLSGEQKKAIVDLLFKTNRKVTVKQLKEDYFKKIECFDSVEISGV
EDRFNASLGTYHDLLKIIKDKDFLDNEENEDILEDIVLTLTLFEDREMIEERLKTYAHLF
DDKVMKQLKRRRYTGWGRLSRKLINGIRDKQSGKTILDFLKSDGFANRNFMQLIHD
DSLTFKEDIQKAQVSGQGDSLHEHIANLAGSPAIKKGILQTVKVVDELVKVMGRHKP
ENIVIEMARENQTTQKGQKNSRERMKRIEEGIKELGSQILKEHPVENTQLQNEKLYL
YYLQNGRDMYVDQELDINRLSDYDVDHIVPQSFLKDDSIDNKVLTRSDKNRGKSDN
VPSEEVVKKMKNYWRQLLNAKLITQRKFDNLTKAERGGLSELDKAGFIKRQLVETR
QITKHVAQILDSRMNTKYDENDKLIREVKVITLKSKLVSDFRKDFQFYKVREINNYHH
AHDAYLNAVVGTALIKKYPKLESEFVYGDYKVYDVRKMIAKSEQEIGKATAKYFFYS
NIMNFFKTEITLANGEIRKRPLIETNGETGEIVWDKGRDFATVRKVLSMPQVNIVKKT
EVQTGGFSKESILPKRNSDKLIARKKDWDPKKYGGFDSPTVAYSVLVVAKVEKGKS
KKLKSVKELLGITIMERSSFEKNPIDFLEAKGYKEVKKDLIIKLPKYSLFELENGRKRM
LASAGELQKGNELALPSKYVNFLYLASHYEKLKGSPEDNEQKQLFVEQHKHYLDEI
EQISEFSKRVILADANLDKVLSAYNKHRDKPIREQAENIIHLFTLTNLGAPAAFKYFDT
TIDRKRYTSTKEVLDATLIHQSITGLYETRIDLSQLGGDSGGSRRGGWRKRAENDG
WETWGGYMAAKVQKLEEQFRSDAAMQKDGTSSTIFSGVAIYVNGYTDPSAEELRK
LMMLHGGQYHVYYSRSKTTHIIATNLPNAKIKELKGEKVIRPEWIVESIKAGRLLSYIP
YQLYTKQSSVQKGLSFNPVCRPEDPLPGPSNIAKQLNNRVNHIVKKIETENEVKVNG
MNSWNEEDENNDFSFVDLEQTSPGRKQNGIPHPRGSTAIFNGHTPSSNGALKTQD
CLVPMVNSVASRLSPAFSQEEDKAEKSSTDFRDCTLQQLQQSTRNTDALRNPHRT
NSFSLSPLHSNTKINGAHHSTVQGPSSTKSTSSVSTFSKAAPSVPSKPSDCNFISNF
YSHSRLHHISMWKCELTEFVNTLQRQSNGIFPGREKLKKMKTGRSALVVTDTGDMS
VLNSPRHQSCIMHVDMDCFFVSVGIRNRPDLKGKPVAVTSNRGTGRAPLRPGANP
QLEWQYYQNKILKGKAADIPDSSLWENPDSAQANGIDSVLSRAEIASCSYEARQLGI
KNGMFFGHAKQLCPNLQAVPYDFHAYKEVAQTLYETLASYTHNIEAVSCDEALVDIT
EILAETKLTPDEFANAVRMEIKDQTKCAASVGIGSNILLARMATRKAKPDGQYHLKPE
EVDDFIRGQLVTNLPGVGHSMESKLASLGIKTCGDLQYMTMAKLQKEFGPKTGQML
YRFCRGLDDRPVRTEKERKSVSAEINYGIRFTQPKEAEAFLLSLSEEIQRRLEATGM
KGKRLTLKIMVRKPGAPVETAKFGGHGICDNIARTVTLDQATDNAKIIGKAMLNMFH
TMKLNISDMRGVGIHVNQLVPTNLNPSTCPSRPSVQSSHFPSGSYSVRDVFQVQKA
KKSTEEEHKEVFRAAVDLEISSASRTCTFLPPFPAHLPTSPDTNKAESSGKWNGLHT
PVSVQSRLNLSIEVPSPSQLDQSVLEALPPDLREQVEQVCAVQQAESHGDKKKEPV
NGCNTGILPQPVGTVLLQIPEPQESNSDAGINLIALPAFSQVDPEVFAALPAELQREL
KAAYDQRQRQGENSTHQQSASASVPKNPLLHLKAAVKEKKRNKKKKTIGSPKRIQS
PLNNKLLNSPAKTLPGACGSPQKLIDGFLKHEGPPAEKPLEELSASTSGVPGLSSLQ
SDPAGCVRPPAPNLAGAVEFNDVKTLLREWITTISDPMEEDILQVVKYCTDLIEEKDL
EKLDLVIKYMKRLMQQSVESVWNMAFDFILDNVQVVLQQTYGSTLKVTSGGSGGS
GGSIGQKTLYSFFSPSPARKRHAPSPEPAVQGTGVAGVPEESGDAAAIPAKKAPAG
QEEPGTPPSSPLSAEQLDRIQRNKAAALLRLAARNVPVGFGESWKKHLSGEFGKPY
FIKLMGFVAEERKHYTVYPPPHQVFTWTQMCDIKDVKVVILGQDPYHGPNQAHGLC
FSVQRPVPPPPSLENIYKELSTDIEDFVHPGHGDLSGWAKQGVLLLNAVLTVRAHQ
ANSHKERGWEQFTDAVVSWLNQNSNGLVFLLWGSYAQKKGSAIDRKRHHVLQTA
HPSPLSVYRGFFGCRHFSKTNELLQKSGKKPIDWKELSGGSKRTADGSEFEPKKK
RKVGGGGSGATNFSLLKQAGDVEENPGPMVSKGEELFTGVVPILVELDGDVNGHK
FSVSGEGEGDATYGKLTLKFICTTGKLPVPWPTLVTTLTYGVQCFSRYPDHMKQHD
FFKSAMPEGYVQERTIFFKDDGNYKTRAEVKFEGDTLVNRIELKGIDFKEDGNILGH
KLEYNYNSHNVYIMADKQKNGIKVNFKIRHNIEDGSVQLADHYQQNTPIGDGPVLLP
DNHYLSTQSALSKDPNEKRDHMVLLEFVTAAGITLGMDELYK
evoFERNY-APOBEC1, SEQ ID NO: 204
MSFERNYDPRELRKETYLLYEIKWGKSGKLWRHWCQNNRTQHAEVYFLENIFNAR
RFNPSTHCSITWYLSWSPCAECSQKIVDFLKEHPNVNLEIYVARLYYPENERNRQG
LRDLVNSGVTIRIMDLPDYNYCWKTFVSDQGGDEDYWPGHFAPWIKQYSLKL
evoAPOBEC1, SEQ ID NO: 205
MSSKTGPVAVDPTLRRRIEPHEFEVFFDPRELRKETCLLYEINWGGRHSIWRHTSQ
NTNKHVEVNFIEKFTTERYFCPNTRCSITWFLSWSPCGECSRAITEFLSRYPNVTLFI
YIARLYHLANPRNRQGLRDLISSGVTIQIMTEQESGYCWHNFVNYSPSNESHWPRY
PHLWVRLYVLELYCIILGLPPCLNILRRKQSQLTSFTIALQSCHYQRLPPH1LWATGLK
BE4max(R33A) w/o UGI = miniCGBE1, SEQ ID NO: 206
MKRTADGSEFESPKKKRKVSSETGPVAVDPTLRRRIEPHEFEVFFDPRELAKETCLL
YEINWGGRHSIWRHTSQNTNKHVEVNFIEKFTTERYFCPNTRCSITWFLSWSPCGE
CSRAITEFLSRYPHVTLFIYIARLYHHADPRNRQGLRDLISSGVTIQIMTEQESGYCW
RNFVNYSPSNEAHWPRYPHLWVRLYVLELYCIILGLPPCLNILRRKQPQLTFFTIALQ
SCHYQRLPPHILWATGLKSGGSSGGSSGSETPGTSESATPESSGGSSGGSDKKYS
IGLAIGTNSVGWAVITDEYKVPSKKFKVLGNTDRHSIKKNLIGALLFDSGETAEATRL
KRTARRRYTRRKNRICYLQEIFSNEMAKVDDSFFHRLEESFLVEEDKKHERHPIFGN
IVDEVAYHEKYPTIYHLRKKLVDSTDKADLRLIYLALAHMIKFRGHFLIEGDLNPDNSD
VDKLFIQLVQTYNQLFEENPINASGVDAKAILSARLSKSRRLENLIAQLPGEKKNGLF
GNLIALSLGLTPNFKSNFDLAEDAKLQLSKDTYDDDLDNLLAQIGDQYADLFLAAKNL
SDAILLSDILRVNTEITKAPLSASMIKRYDEHHQDLTLLKALVRQQLPEKYKEIFFDQS
KNGYAGYIDGGASQEEFYKFIKPILEKMDGTEELLVKLNREDLLRKQRTFDNGSIPH
QIHLGELHAILRRQEDFYPFLKDNREKIEKILTFRIPYYVGPLARGNSRFAWMTRKSE
ETITPWNFEEVVDKGASAQSFIERMTNFDKNLPNEKVLPKHSLLYEYFTVYNELTKV
KYVTEGMRKPAFLSGEQKKAIVDLLFKTNRKVTVKQLKEDYFKKIECFDSVEISGVE
DRFNASLGTYHDLLKIIKDKDFLDNEENEDILEDIVLTLTLFEDREMIEERLKTYAHLFD
DKVMKQLKRRRYTGWGRLSRKLINGIRDKQSGKTILDFLKSDGFANRNFMQLIHDD
SLTFKEDIQKAQVSGQGDSLHEHIANLAGSPAIKKGILQTVKVVDELVKVMGRHKPE
NIVIEMARENQTTQKGQKNSRERMKRIEEGIKELGSQILKEHPVENTQLQNEKLYLY
YLQNGRDMYVDQELDINRLSDYDVDHIVPQSFLKDDSIDNKVLTRSDKNRGKSDNV
PSEEVVKKMKNYWRQLLNAKLITQRKFDNLTKAERGGLSELDKAGFIKRQLVETRQI
TKHVAQILDSRMNTKYDENDKLIREVKVITLKSKLVSDFRKDFQFYKVREINNYHHAH
DAYLNAVVGTALIKKYPKLESEFVYGDYKVYDVRKMIAKSEQEIGKATAKYFFYSNIM
NFFKTEITLANGEIRKRPLIETNGETGEIVWDKGRDFATVRKVLSMPQVNIVKKTEVQ
TGGFSKESILPKRNSDKLIARKKDWDPKKYGGFDSPTVAYSVLWAKVEKGKSKKL
KSVKELLGITIMERSSFEKNPIDFLEAKGYKEVKKDLIIKLPKYSLFELENGRKRMLAS
AGELQKGNELALPSKYVNFLYLASHYEKLKGSPEDNEQKQLFVEQHKHYLDEIIEQI
SEFSKRVILADANLDKVLSAYNKHRDKPIREQAENIIHLFTLTNLGAPAAFKYFDTTID
RKRYTSTKEVLDATLIHQSITGLYETRIDLSQLGGDSGGSKRTADGSEFEPKKKRKV
GGGGSGATNFSLLKQAGDVEENPGPMVSKGEELFTGVVPILVELDGDVNGHKFSV
SGEGEGDATYGKLTLKFICTTGKLPVPWPTLVTTLTYGVQCFSRYPDHMKQHDFFK
SAMPEGYVQERTIFFKDDGNYKTRAEVKFEGDTLVNRIELKGIDFKEDGNILGHKLE
YNYNSHNVYIMADKQKNGIKVNFKIRHNIEDGSVQLADHYQQNTPIGDGPVLLPDNH
YLSTQSALSKDPNEKRDHMVLLEFVTAAGITLGMDELYK
nCas9_NG, SEQ ID NO: 207
MKRTADGSEFESPKKKRKVSGGSSGGSSGSETPGTSESATPESSGGSSGGSDKK
YSIGLAIGTNSVGWAVITDEYKVPSKKFKVLGNTDRHSIKKNLIGALLFDSGETAEAT
RLKRTARRRYTRRKNRICYLQEIFSNEMAKVDDSFFHRLEESFLVEEDKKHERHPIF
GNIVDEVAYHEKYPTIYHLRKKLVDSTDKADLRLIYLALAHMIKFRGHFLIEGDLNPDN
SDVDKLFIQLVQTYNQLFEENPINASGVDAKAILSARLSKSRRLENLIAQLPGEKKNG
LFGNLIALSLGLTPNFKSNFDLAEDAKLQLSKDTYDDDLDNLLAQIGDQYADLFLAAK
NLSDAILLSDILRVNTEITKAPLSASMIKRYDEHHQDLTLLKALVRQQLPEKYKEIFFD
QSKNGYAGYIDGGASQEEFYKFIKPILEKMDGTEELLVKLNREDLLRKQRTFDNGSI
PHQIHLGELHAILRRQEDFYPFLKDNREKIEKILTFRIPYYVGPLARGNSRFAWMTRK
SEETITPWNFEEVVDKGASAQSFIERMTNFDKNLPNEKVLPKHSLLYEYFTVYNELT
KVKYVTEGMRKPAFLSGEQKKAIVDLLFKTNRKVTVKQLKEDYFKKIECFDSVEISG
VEDRFNASLGTYHDLLKIIKDKDFLDNEENEDILEDIVLTLTLFEDREMIEERLKTYAHL
FDDKVMKQLKRRRYTGWGRLSRKLINGIRDKQSGKTILDFLKSDGFANRNFMQLIH
DDSLTFKEDIQKAQVSGQGDSLHEHIANLAGSPAIKKGILQTVKVVDELVKVMGRHK
PENIVIEMARENQTTQKGQKNSRERMKRIEEGIKELGSQILKEHPVENTQLQNEKLY
LYYLQNGRDMYVDQELDINRLSDYDVDHIVPQSFLKDDSIDNKVLTRSDKNRGKSD
NVPSEEVVKKMKNYWRQLLNAKLITQRKFDNLTKAERGGLSELDKAGFIKRQLVET
RQITKHVAQILDSRMNTKYDENDKLIREVKVITLKSKLVSDFRKDFQFYKVREINNYH
HAHDAYLNAVVGTALIKKYPKLESEFVYGDYKVYDVRKMIAKSEQEIGKATAKYFFY
SNIMNFFKTEITLANGEIRKRPLIETNGETGEIVWDKGRDFATVRKVLSMPQVNIVKK
TEVQTGGFSKESIRPKRNSDKLIARKKDWDPKKYGGFVSPTVAYSVLVVAKVEKGK
SKKLKSVKELLGITIMERSSFEKNPIDFLEAKGYKEVKKDLIIKLPKYSLFELENGRKR
MLASARFLQKGNELALPSKYVNFLYLASHYEKLKGSPEDNEQKQLFVEQHKHYLDE
IIEQISEFSKRVILADANLDKVLSAYNKHRDKPIREQAENIIHLFTLTNLGAPRAFKYFD
TTIDRKVYRSTKEVLDATLIHQSITGLYETRIDLSQLGGDSGGSKRTADGSEFEPKKK
RKVGSGATNFSLLKQAGDVEENPGPMVSKGEELFTGVVPILVELDGDVNGHKFSVS
GEGEGDATYGKLTLKFICTTGKLPVPWPTLVTTLTYGVQCFSRYPDHMKQHDFFKS
AMPEGYVQERTIFFKDDGNYKTRAEVKFEGDTLVNRIELKGIDFKEDGNILGHKLEY
NYNSHNVYIMADKQKNGIKVNFKIRHNIEDGSVQLADHYQQNTPIGDGPVLLPDNHY
LSTQSALSKDPNEKRDHMVLLEFVTAAGITLGMDELYKSGGSPKKKRKV
CGBE1_NG, SEQ ID NO: 208
MKRTADGSEFESPKKKRKVANELTWHDVLAEEKQQPYFLNTLQTVASERQSGVTIY
PPQKDVFNAFRFTELGDVKVVILGQDPYHGPGQAHGLAFSVRPGIAIPPSLLNMYKE
LENTIPGFTRPNHGYLESWARQGVLLLNTVLTVRAGQAHSHASLGWETFTDKVISLI
NQHREGVVFLLWGSHAQKKGAIIDKQRHHVLKAPHPSPLSAHRGFFGCNHFVLAN
QWLEQRGETPIDWMPVLPAESESGGSGGSGGSSSETGPVAVDPTLRRRIEPHEFE
VFFDPRELAKETCLLYEINWGGRHSIWRHTSQNTNKHVEVNFIEKFTTERYFCPNTR
CSITWFLSWSPCGECSRAITEFLSRYPHVTLFIYIARLYHHADPRNRQGLRDLISSGV
TIQIMTEQESGYCWRNFVNYSPSNEAHWPRYPHLWVRLYVLELYCIILGLPPCLNIL
RRKQPQLTFFTIALQSCHYQRLPPHILWATGLKSGGSSGGSSGSETPGTSESATPE
SSGGSSGGSDKKYSIGLAIGTNSVGWAVITDEYKVPSKKFKVLGNTDRHSIKKNLIG
ALLFDSGETAEATRLKRTARRRYTRRKNRICYLQEIFSNEMAKVDDSFFHRLEESFL
VEEDKKHERHPIFGNIVDEVAYHEKYPTIYHLRKKLVDSTDKADLRLIYLALAHMIKFR
GHFLIEGDLNPDNSDVDKLFIQLVQTYNQLFEENPINASGVDAKAILSARLSKSRRLE
NLIAQLPGEKKNGLFGNLIALSLGLTPNFKSNFDLAEDAKLQLSKDTYDDDLDNLLAQ
IGDQYADLFLAAKNLSDAILLSDILRVNTEITKAPLSASMIKRYDEHHQDLTLLKALVR
QQLPEKYKEIFFDQSKNGYAGYIDGGASQEEFYKFIKPILEKMDGTEELLVKLNREDL
LRKQRTFDNGSIPHQIHLGELHAILRRQEDFYPFLKDNREKIEKILTFRIPYYVGPLAR
GNSRFAWMTRKSEETITPWNFEEWDKGASAQSFIERMTNFDKNLPNEKVLPKHSL
LYEYFTVYNELTKVKYVTEGMRKPAFLSGEQKKAIVDLLFKTNRKVTVKQLKEDYFK
KIECFDSVEISGVEDRFNASLGTYHDLLKIIKDKDFLDNEENEDILEDIVLTLTLFEDRE
MIEERLKTYAHLFDDKVMKQLKRRRYTGWGRLSRKLINGIRDKQSGKTILDFLKSDG
FANRNFMQLIHDDSLTFKEDIQKAQVSGQGDSLHEHIANLAGSPAIKKGILQTVKVVD
ELVKVMGRHKPENIVIEMARENQTTQKGQKNSRERMKRIEEGIKELGSQILKEHPVE
NTQLQNEKLYLYYLQNGRDMYVDQELDINRLSDYDVDHIVPQSFLKDDSIDNKVLTR
SDKNRGKSDNVPSEEVVKKMKNYWRQLLNAKLITQRKFDNLTKAERGGLSELDKA
GFIKRQLVETRQITKHVAQILDSRMNTKYDENDKLIREVKVITLKSKLVSDFRKDFQF
YKVREINNYHHAHDAYLNAVVGTALIKKYPKLESEFVYGDYKVYDVRKMIAKSEQEI
GKATAKYFFYSNIMNFFKTEITLANGEIRKRPLIETNGETGEIVWDKGRDFATVRKVL
SMPQVNIVKKTEVQTGGFSKESIRPKRNSDKLIARKKDWDPKKYGGFVSPTVAYSV
LVVAKVEKGKSKKLKSVKELLGITIMERSSFEKNPIDFLEAKGYKEVKKDLIIKLPKYSL
FELENGRKRMLASARFLQKGNELALPSKYVNFLYLASHYEKLKGSPEDNEQKQLFV
EQHKHYLDEIIEQISEFSKRVILADANLDKVLSAYNKHRDKPIREQAENIIHLFTLTNLG
APRAFKYFDTTIDRKVYRSTKEVLDATLIHQSITGLYETRIDLSQLGGDSGGSKRTAD
GSEFEPKKKRKVGGGGSGATNFSLLKQAGDVEENPGPMVSKGEELFTGVVPILVEL
DGDVNGHKFSVSGEGEGDATYGKLTLKFICTTGKLPVPWPTLVTTLTYGVQCFSRY
PDHMKQHDFFKSAMPEGYVQERTIFFKDDGNYKTRAEVKFEGDTLVNRIELKGIDF
KEDGNILGHKLEYNYNSHNVYIMADKQKNGIKVNFKIRHNIEDGSVQLADHYQQNTP
IGDGPVLLPDNHYLSTQSALSKDPNEKRDHMVLLEFVTAAGITLGMDELYK
miniCGBE1_NG, SEQ ID NO: 209
MKRTADGSEFESPKKKRKVSSETGPVAVDPTLRRRIEPHEFEVFFDPRELAKETCLL
YEINWGGRHSIWRHTSQNTNKHVEVNFIEKFTTERYFCPNTRCSITWFLSWSPCGE
CSRAITEFLSRYPHVTLFIYIARLYHHADPRNRQGLRDLISSGVTIQIMTEQESGYCW
RNFVNYSPSNEAHWPRYPHLWVRLYVLELYCIILGLPPCLNILRRKQPQLTFFTIALQ
SCHYQRLPPHILWATGLKSGGSSGGSSGSETPGTSESATPESSGGSSGGSDKKYS
IGLAIGTNSVGWAVITDEYKVPSKKFKVLGNTDRHSIKKNLIGALLFDSGETAEATRL
KRTARRRYTRRKNRICYLQEIFSNEMAKVDDSFFHRLEESFLVEEDKKHERHPIFGN
IVDEVAYHEKYPTIYHLRKKLVDSTDKADLRLIYLALAHMIKFRGHFLIEGDLNPDNSD
VDKLFIQLVQTYNQLFEENPINASGVDAKAILSARLSKSRRLENLIAQLPGEKKNGLF
GNLIALSLGLTPNFKSNFDLAEDAKLQLSKDTYDDDLDNLLAQIGDQYADLFLAAKNL
SDAILLSDILRVNTEITKAPLSASMIKRYDEHHQDLTLLKALVRQQLPEKYKEIFFDQS
KNGYAGYIDGGASQEEFYKFIKPILEKMDGTEELLVKLNREDLLRKQRTFDNGSIPH
QIHLGELHAILRRQEDFYPFLKDNREKIEKILTFRIPYYVGPLARGNSRFAWMTRKSE
ETITPWNFEEVVDKGASAQSFIERMTNFDKNLPNEKVLPKHSLLYEYFTVYNELTKV
KYVTEGMRKPAFLSGEQKKAIVDLLFKTNRKVTVKQLKEDYFKKIECFDSVEISGVE
DRFNASLGTYHDLLKIIKDKDFLDNEENEDILEDIVLTLTLFEDREMIEERLKTYAHLFD
DKVMKQLKRRRYTGWGRLSRKLINGIRDKQSGKTILDFLKSDGFANRNFMQLIHDD
SLTFKEDIQKAQVSGQGDSLHEHIANLAGSPAIKKGILQTVKVVDELVKVMGRHKPE
NIVIEMARENQTTQKGQKNSRERMKRIEEGIKELGSQILKEHPVENTQLQNEKLYLY
YLQNGRDMYVDQELDINRLSDYDVDHIVPQSFLKDDSIDNKVLTRSDKNRGKSDNV
PSEEVVKKMKNYWRQLLNAKLITQRKFDNLTKAERGGLSELDKAGFIKRQLVETRQI
TKHVAQILDSRMNTKYDENDKLIREVKVITLKSKLVSDFRKDFQFYKVREINNYHHAH
DAYLNAVVGTALIKKYPKLESEFVYGDYKVYDVRKMIAKSEQEIGKATAKYFFYSNIM
NFFKTEITLANGEIRKRPLIETNGETGEIVWDKGRDFATVRKVLSMPQVNIVKKTEVQ
TGGFSKESIRPKRNSDKLIARKKDWDPKKYGGFVSPTVAYSVLVVAKVEKGKSKKL
KSVKELLGITIMERSSFEKNPIDFLEAKGYKEVKKDLIIKLPKYSLFELENGRKRMLAS
ARFLQKGNELALPSKYVNFLYLASHYEKLKGSPEDNEQKQLFVEQHKHYLDEIIEQIS
EFSKRVILADANLDKVLSAYNKHRDKPIREQAENIIHLFTLTNLGAPRAFKYFDTTIDR
KVYRSTKEVLDATLIHQSITGLYETRIDLSQLGGDSGGSKRTADGSEFEPKKKRKVG
GGGSGATNFSLLKQAGDVEENPGPMVSKGEELFTGVVPILVELDGDVNGHKFSVS
GEGEGDATYGKLTLKFICTTGKLPVPWPTLVTTLTYGVQCFSRYPDHMKQHDFFKS
AMPEGYVQERTIFFKDDGNYKTRAEVKFEGDTLVNRIELKGIDFKEDGNILGHKLEY
NYNSHNVYIMADKQKNGIKVNFKIRHNIEDGSVQLADHYQQNTPIGDGPVLLPDNHY
LSTQSALSKDPNEKRDHMVLLEFVTAAGITLGMDELYK
nCas9_VRQR, SEQ ID NO: 210
MKRTADGSEFESPKKKRKVSGGSSGGSSGSETPGTSESATPESSGGSSGGSDKK
YSIGLAIGTNSVGWAVITDEYKVPSKKFKVLGNTDRHSIKKNLIGALLFDSGETAEAT
RLKRTARRRYTRRKNRICYLQEIFSNEMAKVDDSFFHRLEESFLVEEDKKHERHPIF
GNIVDEVAYHEKYPTIYHLRKKLVDSTDKADLRLIYLALAHMIKFRGHFLIEGDLNPDN
SDVDKLFIQLVQTYNQLFEENPINASGVDAKAILSARLSKSRRLENLIAQLPGEKKNG
LFGNLIALSLGLTPNFKSNFDLAEDAKLQLSKDTYDDDLDNLLAQIGDQYADLFLAAK
NLSDAILLSDILRVNTEITKAPLSASMIKRYDEHHQDLTLLKALVRQQLPEKYKEIFFD
QSKNGYAGYIDGGASQEEFYKFIKPILEKMDGTEELLVKLNREDLLRKQRTFDNGSI
PHQIHLGELHAILRRQEDFYPFLKDNREKIEKILTFRIPYYVGPLARGNSRFAWMTRK
SEETITPWNFEEVVDKGASAQSFIERMTNFDKNLPNEKVLPKHSLLYEYFTVYNELT
KVKYVTEGMRKPAFLSGEQKKAIVDLLFKTNRKVTVKQLKEDYFKKIECFDSVEISG
VEDRFNASLGTYHDLLKIIKDKDFLDNEENEDILEDIVLTLTLFEDREMIEERLKTYAHL
FDDKVMKQLKRRRYTGWGRLSRKLINGIRDKQSGKTILDFLKSDGFANRNFMQLIH
DDSLTFKEDIQKAQVSGQGDSLHEHIANLAGSPAIKKGILQTVKVVDELVKVMGRHK
PENIVIEMARENQTTQKGQKNSRERMKRIEEGIKELGSQILKEHPVENTQLQNEKLY
LYYLQNGRDMYVDQELDINRLSDYDVDHIVPQSFLKDDSIDNKVLTRSDKNRGKSD
NVPSEEVVKKMKNYWRQLLNAKLITQRKFDNLTKAERGGLSELDKAGFIKRQLVET
RQITKHVAQILDSRMNTKYDENDKLIREVKVITLKSKLVSDFRKDFQFYKVREINNYH
HAHDAYLNAVVGTALIKKYPKLESEFVYGDYKVYDVRKMIAKSEQEIGKATAKYFFY
SNIMNFFKTEITLANGEIRKRPLIETNGETGEIVWDKGRDFATVRKVLSMPQVNIVKK
TEVQTGGFSKESILPKRNSDKLIARKKDWDPKKYGGFVSPTVAYSVLVVAKVEKGK
SKKLKSVKELLGITIMERSSFEKNPIDFLEAKGYKEVKKDLIIKLPKYSLFELENGRKR
MLASARELQKGNELALPSKYVNFLYLASHYEKLKGSPEDNEQKQLFVEQHKHYLDE
IIEQISEFSKRVILADANLDKVLSAYNKHRDKPIREQAENIIHLFTLTNLGAPAAFKYFD
TTIDRKQYRSTKEVLDATLIHQSITGLYETRIDLSQLGGDSGGSKRTADGSEFEPKKK
RKVGSGATNFSLLKQAGDVEENPGPMVSKGEELFTGVVPILVELDGDVNGHKFSVS
GEGEGDATYGKLTLKFICTTGKLPVPWPTLVTTLTYGVQCFSRYPDHMKQHDFFKS
AMPEGYVQERTIFFKDDGNYKTRAEVKFEGDTLVNRIELKGIDFKEDGNILGHKLEY
NYNSHNVYIMADKQKNGIKVNFKIRHNIEDGSVQLADHYQQNTPIGDGPVLLPDNHY
LSTQSALSKDPNEKRDHMVLLEFVTAAGITLGMDELYKSGGSPKKKRKV
CGBE1_VRQR, SEQ ID NO: 211
MKRTADGSEFESPKKKRKVANELTWHDVLAEEKQQPYFLNTLQTVASERQSGVTIY
PPQKDVFNAFRFTELGDVKVVILGQDPYHGPGQAHGLAFSVRPGIAIPPSLLNMYKE
LENTIPGFTRPNHGYLESWARQGVLLLNTVLTVRAGQAHSHASLGWETFTDKVISLI
NQHREGVVFLLWGSHAQKKGAIIDKQRHHVLKAPHPSPLSAHRGFFGCNHFVLAN
QWLEQRGETPIDWMPVLPAESESGGSGGSGGSSSETGPVAVDPTLRRRIEPHEFE
VFFDPRELAKETCLLYEINWGGRHSIWRHTSQNTNKHVEVNFIEKFTTERYFCPNTR
CSITWFLSWSPCGECSRAITEFLSRYPHVTLFIYIARLYHHADPRNRQGLRDLISSGV
TIQIMTEQESGYCWRNFVNYSPSNEAHWPRYPHLWVRLYVLELYCIILGLPPCLNIL
RRKQPQLTFFTIALQSCHYQRLPPHILWATGLKSGGSSGGSSGSETPGTSESATPE
SSGGSSGGSDKKYSIGLAIGTNSVGWAVITDEYKVPSKKFKVLGNTDRHSIKKNLIG
ALLFDSGETAEATRLKRTARRRYTRRKNRICYLQEIFSNEMAKVDDSFFHRLEESFL
VEEDKKHERHPIFGNIVDEVAYHEKYPTIYHLRKKLVDSTDKADLRLIYLALAHMIKFR
GHFLIEGDLNPDNSDVDKLFIQLVQTYNQLFEENPINASGVDAKAILSARLSKSRRLE
NLIAQLPGEKKNGLFGNLIALSLGLTPNFKSNFDLAEDAKLQLSKDTYDDDLDNLLAQ
IGDQYADLFLAAKNLSDAILLSDILRVNTEITKAPLSASMIKRYDEHHQDLTLLKALVR
QQLPEKYKEIFFDQSKNGYAGYIDGGASQEEFYKFIKPILEKMDGTEELLVKLNREDL
LRKQRTFDNGSIPHQIHLGELHAILRRQEDFYPFLKDNREKIEKILTFRIPYYVGPLAR
GNSRFAWMTRKSEETITPWNFEEWDKGASAQSFIERMTNFDKNLPNEKVLPKHSL
LYEYFTVYNELTKVKYVTEGMRKPAFLSGEQKKAIVDLLFKTNRKVTVKQLKEDYFK
KIECFDSVEISGVEDRFNASLGTYHDLLKIIKDKDFLDNEENEDILEDIVLTLTLFEDRE
MIEERLKTYAHLFDDKVMKQLKRRRYTGWGRLSRKLINGIRDKQSGKTILDFLKSDG
FANRNFMQLIHDDSLTFKEDIQKAQVSGQGDSLHEHIANLAGSPAIKKGILQTVKVVD
ELVKVMGRHKPENIVIEMARENQTTQKGQKNSRERMKRIEEGIKELGSQILKEHPVE
NTQLQNEKLYLYYLQNGRDMYVDQELDINRLSDYDVDHIVPQSFLKDDSIDNKVLTR
SDKNRGKSDNVPSEEVVKKMKNYWRQLLNAKLITQRKFDNLTKAERGGLSELDKA
GFIKRQLVETRQITKHVAQILDSRMNTKYDENDKLIREVKVITLKSKLVSDFRKDFQF
YKVREINNYHHAHDAYLNAVVGTALIKKYPKLESEFVYGDYKVYDVRKMIAKSEQEI
GKATAKYFFYSNIMNFFKTEITLANGEIRKRPLIETNGETGEIVWDKGRDFATVRKVL
SMPQVNIVKKTEVQTGGFSKESILPKRNSDKLIARKKDWDPKKYGGFVSPTVAYSVL
VVAKVEKGKSKKLKSVKELLGITIMERSSFEKNPIDFLEAKGYKEVKKDLIIKLPKYSL
FELENGRKRMLASARELQKGNELALPSKYVNFLYLASHYEKLKGSPEDNEQKQLFV
EQHKHYLDEIIEQISEFSKRVILADANLDKVLSAYNKHRDKPIREQAENIIHLFTLTNLG
APAAFKYFDTTIDRKQYRSTKEVLDATLIHQSITGLYETRIDLSQLGGDSGGSKRTAD
GSEFEPKKKRKVGGGGSGATNFSLLKQAGDVEENPGPMVSKGEELFTGVVPILVEL
DGDVNGHKFSVSGEGEGDATYGKLTLKFICTTGKLPVPWPTLVTTLTYGVQCFSRY
PDHMKQHDFFKSAMPEGYVQERTIFFKDDGNYKTRAEVKFEGDTLVNRIELKGIDF
KEDGNILGHKLEYNYNSHNVYIMADKQKNGIKVNFKIRHNIEDGSVQLADHYQQNTP
IGDGPVLLPDNHYLSTQSALSKDPNEKRDHMVLLEFVTAAGITLGMDELYK
miniCGBE1_VRQR, SEQ ID NO: 212
MKRTADGSEFESPKKKRKVSSETGPVAVDPTLRRRIEPHEFEVFFDPRELAKETCLL
YEINWGGRHSIWRHTSQNTNKHVEVNFIEKFTTERYFCPNTRCSITWFLSWSPCGE
CSRAITEFLSRYPHVTLFIYIARLYHHADPRNRQGLRDLISSGVTIQIMTEQESGYCW
RNFVNYSPSNEAHWPRYPHLWVRLYVLELYCIILGLPPCLNILRRKQPQLTFFTIALQ
SCHYQRLPPHILWATGLKSGGSSGGSSGSETPGTSESATPESSGGSSGGSDKKYS
IGLAIGTNSVGWAVITDEYKVPSKKFKVLGNTDRHSIKKNLIGALLFDSGETAEATRL
KRTARRRYTRRKNRICYLQEIFSNEMAKVDDSFFHRLEESFLVEEDKKHERHPIFGN
IVDEVAYHEKYPTIYHLRKKLVDSTDKADLRLIYLALAHMIKFRGHFLIEGDLNPDNSD
VDKLFIQLVQTYNQLFEENPINASGVDAKAILSARLSKSRRLENLIAQLPGEKKNGLF
GNLIALSLGLTPNFKSNFDLAEDAKLQLSKDTYDDDLDNLLAQIGDQYADLFLAAKNL
SDAILLSDILRVNTEITKAPLSASMIKRYDEHHQDLTLLKALVRQQLPEKYKEIFFDQS
KNGYAGYIDGGASQEEFYKFIKPILEKMDGTEELLVKLNREDLLRKQRTFDNGSIPH
QIHLGELHAILRRQEDFYPFLKDNREKIEKILTFRIPYYVGPLARGNSRFAWMTRKSE
ETITPWNFEEVVDKGASAQSFIERMTNFDKNLPNEKVLPKHSLLYEYFTVYNELTKV
KYVTEGMRKPAFLSGEQKKAIVDLLFKTNRKVTVKQLKEDYFKKIECFDSVEISGVE
DRFNASLGTYHDLLKIIKDKDFLDNEENEDILEDIVLTLTLFEDREMIEERLKTYAHLFD
DKVMKQLKRRRYTGWGRLSRKLINGIRDKQSGKTILDFLKSDGFANRNFMQLIHDD
SLTFKEDIQKAQVSGQGDSLHEHIANLAGSPAIKKGILQTVKVVDELVKVMGRHKPE
NIVIEMARENQTTQKGQKNSRERMKRIEEGIKELGSQILKEHPVENTQLQNEKLYLY
YLQNGRDMYVDQELDINRLSDYDVDHIVPQSFLKDDSIDNKVLTRSDKNRGKSDNV
PSEEVVKKMKNYWRQLLNAKLITQRKFDNLTKAERGGLSELDKAGFIKRQLVETRQI
TKHVAQILDSRMNTKYDENDKLIREVKVITLKSKLVSDFRKDFQFYKVREINNYHHAH
DAYLNAVVGTALIKKYPKLESEFVYGDYKVYDVRKMIAKSEQEIGKATAKYFFYSNIM
NFFKTEITLANGEIRKRPLIETNGETGEIVWDKGRDFATVRKVLSMPQVNIVKKTEVQ
TGGFSKESILPKRNSDKLIARKKDWDPKKYGGFVSPTVAYSVLVVAKVEKGKSKKLK
SVKELLGITIMERSSFEKNPIDFLEAKGYKEVKKDLIIKLPKYSLFELENGRKRMLASA
RELQKGNELALPSKYVNFLYLASHYEKLKGSPEDNEQKQLFVEQHKHYLDEIIEQIS
EFSKRVILADANLDKVLSAYNKHRDKPIREQAENIIHLFTLTNLGAPAAFKYFDTTIDR
KQYRSTKEVLDATLIHQSITGLYETRIDLSQLGGDSGGSKRTADGSEFEPKKKRKVG
GGGSGATNFSLLKQAGDVEENPGPMVSKGEELFTGVVPILVELDGDVNGHKFSVS
GEGEGDATYGKLTLKFICTTGKLPVPWPTLVTTLTYGVQCFSRYPDHMKQHDFFKS
AMPEGYVQERTIFFKDDGNYKTRAEVKFEGDTLVNRIELKGIDFKEDGNILGHKLEY
NYNSHNVYIMADKQKNGIKVNFKIRHNIEDGSVQLADHYQQNTPIGDGPVLLPDNHY
LSTQSALSKDPNEKRDHMVLLEFVTAAGITLGMDELYK
nCas9(H840A) for PE2, SEQ ID NO: 213
MKRTADGSEFESPKKKRKVDKKYSIGLDIGTNSVGWAVITDEYKVPSKKFKVLGNT
DRHSIKKNLIGALLFDSGETAEATRLKRTARRRYTRRKNRICYLQEIFSNEMAKVDDS
FFHRLEESFLVEEDKKHERHPIFGNIVDEVAYHEKYPTIYHLRKKLVDSTDKADLRLIY
LALAHMIKFRGHFLIEGDLNPDNSDVDKLFIQLVQTYNQLFEENPINASGVDAKAILS
ARLSKSRRLENLIAQLPGEKKNGLFGNLIALSLGLTPNFKSNFDLAEDAKLQLSKDTY
DDDLDNLLAQIGDQYADLFLAAKNLSDAILLSDILRVNTEITKAPLSASMIKRYDEHHQ
DLTLLKALVRQQLPEKYKEIFFDQSKNGYAGYIDGGASQEEFYKFIKPILEKMDGTEE
LLVKLNREDLLRKQRTFDNGSIPHQIHLGELHAILRRQEDFYPFLKDNREKIEKILTFRI
PYYVGPLARGNSRFAWMTRKSEETITPWNFEEVVDKGASAQSFIERMTNFDKNLP
NEKVLPKHSLLYEYFTVYNELTKVKYVTEGMRKPAFLSGEQKKAIVDLLFKTNRKVT
VKQLKEDYFKKIECFDSVEISGVEDRFNASLGTYHDLLKIIKDKDFLDNEENEDILEDI
VLTLTLFEDREMIEERLKTYAHLFDDKVMKQLKRRRYTGWGRLSRKLINGIRDKQSG
KTILDFLKSDGFANRNFMQLIHDDSLTFKEDIQKAQVSGQGDSLHEHIANLAGSPAIK
KGILQTVKVVDELVKVMGRHKPENIVIEMARENQTTQKGQKNSRERMKRIEEGIKEL
GSQILKEHPVENTQLQNEKLYLYYLQNGRDMYVDQELDINRLSDYDVDAIVPQSFLK
DDSIDNKVLTRSDKNRGKSDNVPSEEVVKKMKNYWRQLLNAKLITQRKFDNLTKAE
RGGLSELDKAGFIKRQLVETRQITKHVAQILDSRMNTKYDENDKLIREVKVITLKSKL
VSDFRKDFQFYKVREINNYHHAHDAYLNAVVGTALIKKYPKLESEFVYGDYKVYDVR
KMIAKSEQEIGKATAKYFFYSNIMNFFKTEITLANGEIRKRPLIETNGETGEIVWDKGR
DFATVRKVLSMPQVNIVKKTEVQTGGFSKESILPKRNSDKLIARKKDWDPKKYGGF
DSPTVAYSVLVVAKVEKGKSKKLKSVKELLGITIMERSSFEKNPIDFLEAKGYKEVKK
DLIIKLPKYSLFELENGRKRMLASAGELQKGNELALPSKYVNFLYLASHYEKLKGSPE
DNEQKQLFVEQHKHYLDEIIEQISEFSKRVILADANLDKVLSAYNKHRDKPIREQAENI
IHLFTLTNLGAPAAFKYFDTTIDRKRYTSTKEVLDATLIHQSITGLYETRIDLSQLGGD
SGGSSGGSSGSETPGTSESATPESSGGSSGGSSSGGSKRTADGSEFEPKKKRKV
GSGATNFSLLKQAGDVEENPGPMVSKGEELFTGVVPILVELDGDVNGHKFSVSGE
GEGDATYGKLTLKFICTTGKLPVPWPTLVTTLTYGVQCFSRYPDHMKQHDFFKSAM
PEGYVQERTIFFKDDGNYKTRAEVKFEGDTLVNRIELKGIDFKEDGNILGHKLEYNY
NSHNVYIMADKQKNGIKVNFKIRHNIEDGSVQLADHYQQNTPIGDGPVLLPDNHYLS
TQSALSKDPNEKRDHMVLLEFVTAAGITLGMDELYK
PE2, SEQ ID NO: 214
MKRTADGSEFESPKKKRKVDKKYSIGLDIGTNSVGWAVITDEYKVPSKKFKVLGNT
DRHSIKKNLIGALLFDSGETAEATRLKRTARRRYTRRKNRICYLQEIFSNEMAKVDDS
FFHRLEESFLVEEDKKHERHPIFGNIVDEVAYHEKYPTIYHLRKKLVDSTDKADLRLIY
LALAHMIKFRGHFLIEGDLNPDNSDVDKLFIQLVQTYNQLFEENPINASGVDAKAILS
ARLSKSRRLENLIAQLPGEKKNGLFGNLIALSLGLTPNFKSNFDLAEDAKLQLSKDTY
DDDLDNLLAQIGDQYADLFLAAKNLSDAILLSDILRVNTEITKAPLSASMIKRYDEHHQ
DLTLLKALVRQQLPEKYKEIFFDQSKNGYAGYIDGGASQEEFYKFIKPILEKMDGTEE
LLVKLNREDLLRKQRTFDNGSIPHQIHLGELHAILRRQEDFYPFLKDNREKIEKILTFRI
PYYVGPLARGNSRFAWMTRKSEETITPWNFEEVVDKGASAQSFIERMTNFDKNLP
NEKVLPKHSLLYEYFTVYNELTKVKYVTEGMRKPAFLSGEQKKAIVDLLFKTNRKVT
VKQLKEDYFKKIECFDSVEISGVEDRFNASLGTYHDLLKIIKDKDFLDNEENEDILEDI
VLTLTLFEDREMIEERLKTYAHLFDDKVMKQLKRRRYTGWGRLSRKLINGIRDKQSG
KTILDFLKSDGFANRNFMQLIHDDSLTFKEDIQKAQVSGQGDSLHEHIANLAGSPAIK
KGILQTVKVVDELVKVMGRHKPENIVIEMARENQTTQKGQKNSRERMKRIEEGIKEL
GSQILKEHPVENTQLQNEKLYLYYLQNGRDMYVDQELDINRLSDYDVDAIVPQSFLK
DDSIDNKVLTRSDKNRGKSDNVPSEEVVKKMKNYWRQLLNAKLITQRKFDNLTKAE
RGGLSELDKAGFIKRQLVETRQITKHVAQILDSRMNTKYDENDKLIREVKVITLKSKL
VSDFRKDFQFYKVREINNYHHAHDAYLNAVVGTALIKKYPKLESEFVYGDYKVYDVR
KMIAKSEQEIGKATAKYFFYSNIMNFFKTEITLANGEIRKRPLIETNGETGEIVWDKGR
DFATVRKVLSMPQVNIVKKTEVQTGGFSKESILPKRNSDKLIARKKDWDPKKYGGF
DSPTVAYSVLVVAKVEKGKSKKLKSVKELLGITIMERSSFEKNPIDFLEAKGYKEVKK
DLIIKLPKYSLFELENGRKRMLASAGELQKGNELALPSKYVNFLYLASHYEKLKGSPE
DNEQKQLFVEQHKHYLDEIIEQISEFSKRVILADANLDKVLSAYNKHRDKPIREQAENI
IHLFTLTNLGAPAAFKYFDTTIDRKRYTSTKEVLDATLIHQSITGLYETRIDLSQLGGD
SGGSSGGSSGSETPGTSESATPESSGGSSGGSSTLNIEDEYRLHETSKEPDVSLG
STWLSDFPQAWAETGGMGLAVRQAPLIIPLKATSTPVSIKQYPMSQEARLGIKPHIQ
RLLDQGILVPCQSPWNTPLLPVKKPGTNDYRPVQDLREVNKRVEDIHPTVPNPYNL
LSGLPPSHQWYTVLDLKDAFFCLRLHPTSQPLFAFEWRDPEMGISGQLTWTRLPQ
GFKNSPTLFNEALHRDLADFRIQHPDLILLQYVDDLLLAATSELDCQQGTRALLQTLG
NLGYRASAKKAQICQKQVKYLGYLLKEGQRWLTEARKETVMGQPTPKTPRQLREF
LGKAGFCRLFIPGFAEMAAPLYPLTKPGTLFNWGPDQQKAYQEIKQALLTAPALGLP
DLTKPFELFVDEKQGYAKGVLTQKLGPWRRPVAYLSKKLDPVAAGWPPCLRMVAAI
AVLTKDAGKLTMGQPLVILAPHAVEALVKQPPDRWLSNARMTHYQALLLDTDRVQF
GPVVALNPATLLPLPEEGLQHNCLDILAEAHGTRPDLTDQPLPDADHTWYTDGSSL
LQEGQRKAGAAVTTETEVIWAKALPAGTSAQRAELIALTQALKMAEGKKLNVYTDS
RYAFATAHIHGEIYRRRGWLTSEGKEIKNKDEILALLKALFLPKRLSIIHCPGHQKGHS
AEARGNRMADQAARKAAITETPDTSTLLIENSSPSGGSKRTADGSEFEPKKKRKVG
SGATNFSLLKQAGDVEENPGPMVSKGEELFTGVVPILVELDGDVNGHKFSVSGEG
EGDATYGKLTLKFICTTGKLPVPWPTLVTTLTYGVQCFSRYPDHMKQHDFFKSAMP
EGYVQERTIFFKDDGNYKTRAEVKFEGDTLVNRIELKGIDFKEDGNILGHKLEYNYN
SHNVYIMADKQKNGIKVNFKIRHNIEDGSVQLADHYQQNTPIGDGPVLLPDNHYLST
QSALSKDPNEKRDHMVLLEFVTAAGITLGMDELYK
Wild type Cas9, SEQ ID NO: 215
MDKKYSIGLDIGTNSVGWAVITDEYKVPSKKFKVLGNTDRHSIKKNLIGALLFDSGET
AEATRLKRTARRRYTRRKNRICYLQEIFSNEMAKVDDSFFHRLEESFLVEEDKKHER
HPIFGNIVDEVAYHEKYPTIYHLRKKLVDSTDKADLRLIYLALAHMIKFRGHFLIEGDL
NPDNSDVDKLFIQLVQTYNQLFEENPINASGVDAKAILSARLSKSRRLENLIAQLPGE
KKNGLFGNLIALSLGLTPNFKSNFDLAEDAKLQLSKDTYDDDLDNLLAQIGDQYADL
FLAAKNLSDAILLSDILRVNTEITKAPLSASMIKRYDEHHQDLTLLKALVRQQLPEKYK
EIFFDQSKNGYAGYIDGGASQEEFYKFIKPILEKMDGTEELLVKLNREDLLRKQRTFD
NGSIPHQIHLGELHAILRRQEDFYPFLKDNREKIEKILTFRIPYYVGPLARGNSRFAW
MTRKSEETITPWNFEEVVDKGASAQSFIERMTNFDKNLPNEKVLPKHSLLYEYFTVY
NELTKVKYVTEGMRKPAFLSGEQKKAIVDLLFKTNRKVTVKQLKEDYFKKIECFDSV
EISGVEDRFNASLGTYHDLLKIIKDKDFLDNEENEDILEDIVLTLTLFEDREMIEERLKT
YAHLFDDKVMKQLKRRRYTGWGRLSRKLINGIRDKQSGKTILDFLKSDGFANRNFM
QLIHDDSLTFKEDIQKAQVSGQGDSLHEHIANLAGSPAIKKGILQTVKVVDELVKVMG
RHKPENIVIEMARENQTTQKGQKNSRERMKRIEEGIKELGSQILKEHPVENTQLQNE
KLYLYYLQNGRDMYVDQELDINRLSDYDVDHIVPQSFLKDDSIDNKVLTRSDKNRGK
SDNVPSEEVVKKMKNYWRQLLNAKLITQRKFDNLTKAERGGLSELDKAGFIKRQLV
ETRQITKHVAQILDSRMNTKYDENDKLIREVKVITLKSKLVSDFRKDFQFYKVREINN
YHHAHDAYLNAVVGTALIKKYPKLESEFVYGDYKVYDVRKMIAKSEQEIGKATAKYF
FYSNIMNFFKTEITLANGEIRKRPLIETNGETGEIVWDKGRDFATVRKVLSMPQVNIV
KKTEVQTGGFSKESILPKRNSDKLIARKKDWDPKKYGGFDSPTVAYSVLVVAKVEK
GKSKKLKSVKELLGITIMERSSFEKNPIDFLEAKGYKEVKKDLIIKLPKYSLFELENGR
KRMLASAGELQKGNELALPSKYVNFLYLASHYEKLKGSPEDNEQKQLFVEQHKHYL
DEIIEQISEFSKRVILADANLDKVLSAYNKHRDKPIREQAENIIHLFTLTNLGAPAAFKY
FDTTIDRKRYTSTKEVLDATLIHQSITGLYETRIDLSQLGGDGSPKKKRKVSSDYKDH
DGDYKDHDIDYKDDDDK
SEQ ID NO: 318
>sp|P97931|UNG_MOUSE Uracil-DNA glycosylase OS = Mus musculus OX = 10090
GN = Ung PE = 1 SV = 3
MIGQKTLYSFFSPTPTGKRTTRSPEPVPGSGVAAEIGGDAVASPAKKARVEQNEQG
SPLSAEQLVRIQRNKAAALLRLAARNVPAGFGESWKQQLCGEFGKPYFVKLMGFV
AEERNHHKVYPPPEQVFTWTQMCDIRDVKVVILGQDPYHGPNQAHGLCFSVQRPV
PPPPSLENIFKELSTDIDGFVHPGHGDLSGWARQGVLLLNAVLTVRAHQANSHKER
GWEQFTDAVVSWLNQNLSGLVFLLWGSYAQKKGSVIDRKRHHVLQTAHPSPLSVH
RGFLGCRHFSKANELLQKSGKKPINWKEL
SEQ ID NO: 319
>tr|Q5BK44|Q5BK44_RAT Uracil-DNA glycosylase OS = Rattus norvegicus
OX = 10116GN = Ung PE = 2 SV = 1
MGILGPRPLKLARSLRAPRGARLRSLTPDPDSWQASPAKKARVEQDEPATPPSSPL
SAEQLVRIQRNKAAALLRLAARNVPAGLGESWKQQLCGEFGKPYFVKLMGFVAEE
RKHHKVYPPPEQVFTWTQMCDIRDVKVVILGQDPYHGPNQAHGLCFSVQRPVPPP
PSLENIFKELSTDIDGFVHPGHGDLSGWARQGVLLLNAVLTVRAHQANSHKERGWE
QFTDAVVSWLNQNLNGLVFLLWGSYAQKKGSAIDRKRHHVLQTAHPSPLSVYRGF
FGCRHFSKANELLQRSGKKPISWKEL
SEQ ID NO: 320
>sp|P12887|UNG_YEAST Uracil-DNA glycosylase OS = Saccharomyces cerevisiae
(strain ATCC 204508/S288c) OX = 559292 GN = UNG1 PE = 1 SV = 1
MWCMRRLPTNSVMTVARKRKQTTIEDFFGTKKSTNEAPNKKGKSGATFMTITNGA
AIKTETKAVAKEANTDKYPANSNAKDVYSKNLSSNLRTLLSLELETIDDSWFPHLMD
EFKKPYFVKLKQFVTKEQADHTVFPPAKDIYSWTRLTPFNKVKVVIIGQDPYHNFNQ
AHGLAFSVKPPTPAPPSLKNIYKELKQEYPDFVEDNKVGDLTHWASQGVLLLNTSLT
VRAHNANSHSKHGWETFTKRVVQLLIQDREADGKSLVFLLWGNNAIKLVESLLGST
SVGSGSKYPNIMVMKSVHPSPLSASRGFFGTNHFKMINDWLYNTRGEKMIDWSVV
PGTSLREVQEANARLESESKDP
SEQ ID NO: 321
>sp|Q9U221|UNG_CAEEL Uracil-DNA glycosylase OS = Caenorhabditis elegans
OX = 6239 GN = ung-1 PE = 1 SV = 1
MSKTVRIPDMFLKASAASKRKSASNTENIPEKVPAGNENQEVKKMKLQAPEPTEILL
KSLLTGESWSKLLEEEFKKGYISKIEKFLNSEVNKGKQVFPPPTQIFTTFNLLPFDEIS
VVIIGQDPYHDDNQAHGLSFSVQKGVKPPPSLKNIYKELESDIEGFKRPDHGNLLGW
TRQGVFMLNATLTVRAHEANSHAKIGWQTFTDTVIRIISRQSEKPIVFLLWGGFAHK
KEELIDTKKHVVIKTAHPSPLSARKWWGCKCFSKCNTELENSGRNPINWADL
SEQ ID NO: 322
>sp|Q9LIH6|UNG_ARATH Uracil-DNA glycosylase, mitochondrial OS = Arabidopsis
thaliana OX = 3702 GN = UNG PE = 1 SV = 1
[sequence omitted]
SEQ ID NO: 323
>tr|Q7ZVD1|Q7ZVD1_DANRE Uracil-DNA glycosylase OS = Danio rerio OX = 7955
GN = unga PE = 2 SV = 1
MIGQKSIKSFFSPASKKRNLDEIKTGETRDDVKKQKLESGNEAPLSPEQLERIAKNK
KAA
LERLQSAAPDGIGESWLKALSAEFGKSYFKSLMSFVGEERKKHTIYPPPHAVFTWT
QTCDIKDVKVVILGQDPYHGPNQAHGLCFSVQRPVPPPPSLVNIFKELASDIEGFVQ
PDHGDLTGWANQGVLLLNAVLTVRAHQANSHKDKGWETFTDAVVHWLSSNMQGL
VFILWGSYAQKKGAAINKKQHHVLQAVHPSPLSAHRGFFGCKHFSKANELLKKSGK
KPIDWKAL
SEQ ID NO: 324
>tr|G1SJ42|G1SJ42_RABIT Uracil-DNA glycosylase OS = Oryctolagus cuniculus
OX = 9986 GN = UNG PE = 3 SV = 1
MIGQKTLYSFFSPSPAGKRHTRSPEPAAPGTGVAAATEESRDAEASPAKKARAGKD
EPGTPPSSPLSPEQLVRIQRNKAAALLRLAARNVPVGFGESWKKHLCGEFGKPYFI
KLMGFVAEERKHHTVYPPPHQVFTWTQMCDIRDVKVVILGQDPYHGPSQAHGLCF
SVQRPVPPPPSLENIYKELSTDIEGFVHPGHGDLSGWAKQGVLLLNAVLTVRAHQP
TSHKDRGWEQFTDAVVSWLNHNSSGLVFLLWGSYAQRKGSAIDRKRHHVLQTAH
PSPLSVYRGFFGCRHFSKTNELLRKSGKKPIDWTKL
SEQ ID NO: 325
>tr|A0A452THE0|A0A452THE0_URSMA Uracil-DNA glycosylase OS = Ursus
maritimus OX = 29073 GN = UNG PE = 3 SV = 1
MARIQNLNSNSYTGSHARRTLTENKNCDNERALGVWGKGAGSLRLPVHEPRSPEP
CKHRGPPKKARAVQEDPGTPPSSPLSPEQLVRIQRNKAAALLRLAARNVPVGFGES
WKKPLSAEFGKPYFIKLMGFVAEERKHYTVYPPPHQVFTWTQMCDIRQVKVVILGQ
DPYHGPNQAHGLCFSVQRPVPPPPSLENIYKELSTDIDGFVHPGHGDLSGWAKQG
VLLLNAVLTVRAHQANSHKERGWEQFTDAVVSWLNQNSSGLVFLLWGSYAQKKG
SAIDRKRHHVLQTAHPSPLSVYRGFFGCRHFSKTNELLRKSGKEPINWKDL
SEQ ID NO: 326
>tr|A0A2K6MB33|A0A2K6MB33_RHIBE Uracil-DNA glycosylase OS = Rhinopithecus
bieti OX = 61621 GN = UNG PE = 3 SV = 1
MIGQKTLYSFFSPSPARKRRAPSPEPAVLGTGVAAVPEENGDAAANPAKKAPAAQE
ESGTPSSSPLSAEQLDRIQRNKAAALLRLAARNVPVGFGESWKKHLSGEFGKPYFI
KLMGFVAEERKHYTVYPPPHQVFTWTQMCDIRDVKVVILGQDPYHGPNQAHGLCF
SVQRPVPPPPSLENIYKELSTDIEDFVHPGHGDLSGWAKQGVLLLNAVLTVRAHQA
NSHKERGWEQFTDAVVSWLNQNSNGLVFLLWGSYAQKKGSAIDRKRHHVLQTAH
PSPLSVYRGFFGCRHFSKTNELLQKSGKXVKWEFRGLTAFRAGSPEHRFTHIFINS
KPVISIVLQILN
SEQ ID NO: 327
>tr|A0A4X2KC02|A0A4X2KC02_VOMUR Uracil-DNA glycosylase OS = Vombatus
ursinus OX = 29139 GN = UNG PE = 3 SV = 1
MIGQKTLHSFFSPSAPKKRRSCTETPADPGTEAVVQSEDASVSPVRKRRPEDEPRA
PSSPLSPEQLDRIQRNKAAALLRLASRNVPAGFGESWKRQLSAEFGKPYFIQLMGF
VAEERKRHTVYPPPDQVFTWTQLCEIRDVKVVILGQDPYHGPNQAHGLCFSVQRP
VPPPPSLENIYKELSTDIEGFAPPGHGDLSGWARQGVLLLNAVLTVRAHQANSHKE
RGWEQFTDAVVSWLNENLDGLVFMLWGSYAQKKGLSINRKRHHVLQTAHPSPLSV
HRGFLGCRHFSKTNELLKKSGKKPIDWKAL
SEQ ID NO: 328
>tr|A0A1X2AUJ0|A0A1X2AUJ0_9MYCO Uracil-DNA glycosylase
OS = Mycobacterium riyadhense OX = 486698 GN = ung PE = 3 SV = 1
MTARPLSELVEQGWAAALAPVTEQVAQMGQFLRTEIAAGRRYLPAGSNVLRAFTFP
FDEVRVLIVGQDPYPTPGHAVGLSFSVAPDVRPLPRSLANIFDEYTADLGHPQPSC
GDLSPWAQRGVLLLNRVLTVRPSNPASHRGKGWEAVTECAIRALAARSKPLVAILW
GRDASTLKPMLATGNCVAIESPHPSPLSASRGFFGSRPFSRANELLAGMGGDPVD
WRLP
SEQ ID NO: 329
>tr|A0A498LRM7|A0A498LRM7_LABRO Uracil-DNA glycosylase OS = Labeo rohita
OX = 84645 GN = UNG PE = 3 SV = 1
MQLSEEQLHQIEQNRRAALERLAKRNVPVPVGESWRKKIGTEFTKPYFTKLMSFVT
MERKCFTVYPSPEQVFHCTTLCAIEDVKVVILGQDPYHHPGQAHGLAFSVLRPKPP
PPSLENIFMELKEDIVGFRHPGHGDLTGWAKQGVLLLNSVLTVRAHQPTSHEGQG
WEIFTDAVVLWLSRNLNGLVFLLWGSYAQRKGRVIDRSLEERCQRILQGMEGSLTA
RDRVGIQDFVLLDAYTSETAFMDNLRKRFNENLIYTYIGTLLVSVNPYKELGIYTKKQ
MDIYMGVNFFELPPHIFALADNVYRTMISETNNHFILISGESGAGKTEASKKVLQFYA
VCCPSTRLLDNVRDRLLLSNPVLEAFGNAKTLKNDNSSRFGKYMDIQFDHQGAAVG
GHILSYLLEKSRVVHQNHGERNFHIFYQLVEGGEDELLRWLGLERNCQNYRYLIQG
ECAKVSSINDKSDWKTVQKALTIIEFSEKDIEHLFAIIASVLHLGNVHFEASAMGYAKL
NSNAEVHWLSKLLGIPSNMLQEGLTHRKIEAKAEEVLSPFTAEHAKYARDALAKAIY
GRTFSWLVNKINESLANKWEPVPYFNNKIICDLVEEKHRGIISVLDEECLRPGEATDF
TFLEKLEEKMSGHPHFVTHKLADQKTRKTLERGDFRLLHYAGEVTYSVVGFLDKNN
DLLYRNIKEVMRQSKNSIIQHCFHTIEPDGKKRPETVATQFKSSLAGLTEILMTKEPW
YVRCLKPNHCKQPDRFDDVMVRHQVKYLGLMEHLRVRRAGFAYRRRYEVFLKRR
CFSLLLTCEHLTNLNAYLCRYKPLCPDTWPHWKGTPAEGVQRLIKHLGYKPDEYKM
GRTKIFIRHPRTLFATEDAFEICKHELATRIQAKYKGYRVKGEYQRQREAATKIETCW
RGLQARKERERRAWAVKVIKKFIKGFMNRNQPVSMDNSEYLAFVRQSYLTRLQEN
LPKSVLDKTTWLTPPPIMQEYSVPVIKYDRNGFRPRFRQLIFTQAAAYLVEEAKIKQR
VNYSSLKGVSVSNLSDNFLILHVTCEDTKQKGDLVLQCSYLFEALTKICVVTKNHNLI
KVVQGSVRFDIQPGKEGFVDFKSSSESMVYRAKNGHLMVGDFVDRGYYSLETFTY
LLALKAKWPDRITLLRGNHESRQITQVYGFYDECQTKYGNANAWRYCTKVFDMLTV
AALIDEQILCVHGGLSPDIKTLDQIRTIERNQEIPHKGAFCDLVWSDPEDVDTWAISP
RGAGWLFGAKVTNEFVHINNLKLICRAHQLVHEGYKFMFDEKLVTVWSAPNYCYRC
GNIASIMVFKDVNTREPKLFRAVPDSERVIPPRTTTPYFL
SEQ ID NO: 330
>sp|O74834|UNG_SCHPO Uracil-DNA glycosylase OS = Schizosaccharomyces
pombe (strain 972/ATCC 24843) OX = 284812 GN = ung1 PE = 3 SV = 1
MTVLNTTDKRKADDTVNKLDGKLKQPRLDNFFKTNTSSPALKDTQVLDNKENNSVS
KFNKEKWAENLTPAQRKLLQLEIDTLESSWFDALKDEFLKPYFLNLKEFLMKEWQS
QRVFPPKEDIYSWSHHTPLHKTKVILLGQDPYHNIGQAHGLCFSVRPGIPCPPSLVNI
YKAIKIDYPDFVIPKTGYLVPWADQGILMLNASLTVRAHQAASHSGKGWETFTSAVL
QVALNRNRKGLVILAWGTPAAKRLQGLPLKAHYVLRSVHPSPLSAHRGFFECHHFK
KTNEWLEEQYGPEKCINWSAVSEQKAKIKSSELESSSTE
SEQ ID NO: 331
>tr|A0A3B5KG53|A0A3B5KG53_TAKRU Uracil-DNA glycosylase OS = Takifugu
rubripes OX = 31033 GN = ung PE = 3 SV = 1
MIGQKTINSFFSPVPKKRICKDLSETEEDAKDHIIQKKRKSPEPEPASPPAAPLSSEQ
LERIARNKRAALERLTSAQIPAGIGEGWRDKLSAEFGKPYFKQLTTYVAEERKRRTV
YPPADQVFTWTQMCDIRDVKVVILGQDPYHGHNQAHGLCFSVKRPVPPPPSLENM
YKELVSDIPGFQHPGHGDLTGWAKQGVLLLNAVLTVRAHNANSHKDKGWETFTDA
VVQWLNTNLDGVVFMLWGSYAQKKGAAINRKRHHVLQTVHPSPLSAHRGFFGCA
HFSKANELLKKSGKSPVDWKA
L
SEQ ID NO: 332
>tr|I3M8Q6|I3M8Q6_ICTTR Uracil-DNA glycosylase OS = Ictidomys tridecemlineatus
OX = 43179 GN = UNG PE = 3 SV = 1
MIGQKTLYSFFSPSPARKRSVRSPEPADLGTGVVAVAEENGDAADHPTKKARVGQ
EEPDTPPSSPLSQEQLVRIQRNKAAALLRLAARNVPVGFGESWRKPLGAEFGKPYF
IKLMGFVAEERKRYTVYPPPHQVFTWTQTCDIKDVKVVILGQDPYHGPNQAHGLCF
SVQRPVPPPPSLENIYKELSTDIDGFVHPGHGDLSGWAKQGVLLLNAVLTVRAHQA
NSHKERGWEEFTDAVVSWLNQNLNGLVFLLWGSYAQKKGIAIDRKRHHVLQTAHP
SPLSVYRGFFGCRHFSKANELLQKSGKKPIDWKEL
SEQ ID NO: 333
>tr|A0A3P9H4T8|A0A3P9H4T8_ORYLA Uracil-DNA glycosylase OS = Oryzias latipes
OX = 8090 GN = UNG PE = 3 SV = 1
MLWLRHRSCDKLVGRFLGTGSVIRNKMMKNWGVIGGIAAAVAAGVYVLWGPITVK
KKRKKGMSPGLLNLGNTCFLNALLQGLAACPSFIRWLEKFSGLPSIQSCKDNQLSTT
LLQLLKALSSDEPGEDVLDAGCLLDVLRLYRWHISSFEEQDAHELFHVITSSLEEER
DRQPKVTHLFDVQFLESFPNQDDKALTCISRAPLHPLPGSWKFQHPFHGRLTSNMS
CKRCETQSPVRYDSFESLSLSILLPQWGRPISLDQCLQHFISSETIKEVECENCTKLQ
QHSSINGQLLESQRTTFVKQLRLGKLPQCLCIHLQRLMWSNEGSPIKRQEHVQFSE
YLSMDRYKHDSSTPRTQRVRCAPKTIKAESFDSIEKSMANGTEHHNNNKPFLNGTC
SSMFLGSGVKNPFGFTHHDNSSAEYLFQLVAVLVHLGDMHSGHFVTYRRSPSSSR
SSSNFSSQWLWVSDDSKKLKIAAVDPEPQSSPLSPEQLDKIARNKKAALEKLASGLT
PQGFSESWRGELLSEFSKPYFKDLTKFVSDERKRGTVYPPAEQIFTWTQMCDIRDV
KVVILGQDPYHGPGQAHGLCFSVKRPVSPPPSLENMYKELVSDIEGFKHPGHGDLT
GWAQQGVLLLNAVLTVRAHQANSHKDKGWEVFTDAVVQWLSNNLQGLVFLLWGS
YAQKKGSAINRKHHHVLQAVHPSPLSAHRGFFGCKHFSKANELLKKSGKSPIDWKA
L
SEQ ID NO: 334
>tr|A0A4W4HK79|A0A4W4HK79_ELEEL Uracil-DNA glycosylase OS = Electrophorus
electricus OX = 8005 GN = ung PE = 3 SV = 1
MIGQKSIKSFFSPTSKKRDTDEQTRSEDICNVKKFKTNTSAVLPSPSLSPELLEKIAK
NKKAAQERLAARSAPEGIGKSWQRALGAEFGKTYFKSLMSFVAEERQKQTIYPPPH
QVFTWTRMCEIEDVKVVVLGQDPYHGPNQAHGLCFSVQRPVPPPPSLVNMYKELE
ADIEGFRHPGHGDLTGWAKQGVLLLNAVLTVRAHQANSHKDKGWEILTDAVVNWL
SANLEGLVFMLWGAYAQKKGAAIDRKRHHVLQAVHPSPLSAHRGFFGCKHFSKTN
ELLKKSGKKPIDWKAL
SEQ ID NO: 335
>tr|A0A5G3K4Q6|A0A5G3K4Q6_XENTR Uracil-DNA glycosylase OS = Xenopus
tropicalis OX = 8364 GN = aoc3 PE = 3 SV = 1
MSHPICRPNMSVMFWLLPFPKLPVLSESWRQTSVVCSIRTKQRIGAGVIIPGFSRGA
MIGQRTINSFFGPAAKKRAAPEALGEEGPYKGEITPVKKSRQSGENEIPPAVSPPLS
PEQLERIQRNKAAALQKLAARHVPEGLGQSWKQALLAEFAKPYFVKLSNFVAEERK
KYTVYPPPEEVFTWTQMVDIKDVKVVILGQDPYHGPNQAHGLCFSVKKPVPPPPSL
VNMYKELETDIEGFSHPGHGDLTGWAKQGVLLLNAVLTVRAHNANSHKDCGWEQF
TDSVVSWLNKNMDGLVFMLWGAYAQKKGSNIDRKRHLVLQTVHPSPLSAHRGFFG
CCHFSKTNAYLQGLGKKPIDWKAL
SEQ ID NO: 336
>tr|A0A0F0TTY1|A0A0F0TTY1_ENTCL Uracil-DNA glycosylase OS = Enterobacter
cloacae subsp. cloacae OX = 336306 GN = ung PE = 3 SV = 1
MTTPLTWHDVLAEEKQQPYFINTLSTVAAERQSGQTIYPPQKDVFNAFRYTELSDV
KWILGQDPYHGPGQAHGLAFSVRPGVAIPPSLLNMYKELEGTIPGFTRPNHGYLES
WARQGVLLLNTVLTVRAGQAHSHASLGWETFTDKVISLINEHREGVVFLLWGSHAQ
KKGAIIDRQRHHVLKAPHPSPLSAHRGFFGCNHFVLANEWLEKRGETPIDWMPVLP
AESE
SEQ ID NO: 337
>tr|A0A1V4IJH4|A0A1V4IJH4_9CLOT Uracil-DNA glycosylase OS = Clostridium
oryzae OX = 1450648 GN = ung PE = 3 SV = 1
MTVNIKNDWLELLEDQFEMDYYKDLRHFLISEYKTRTIYPDMYDIFNALNYTAYKDVK
VVILGQDPYHGPNQAHGLSFSVKPGVPAPPSLINIYKELKDDLGCYIPNNGYLKKWT
DEGVLLLNTALTVRAGEANSHRNKGWEIFTDAIISLLNKREKSIVFILWGSNAISKEKLI
TNKAHYIIKSPHPSPLSAHRGFFGSKPFSKANNFLKSIGEKPIDWQIENI
SEQ ID NO: 338
>tr|A0A1C3ZIJ7|A0A1C3ZIJ7_9LACO Uracil-DNA glycosylase OS = Lactobacillus
apis OX = 303541 GN = ung PE = 3 SV = 1
MKKFIGNDWDEVLAPVFESNEYHALHEFLKKEYQTKRIFPDMYHIFTAFKLTPFAKT
KWILGQDPYHNPGQATGMSFAVMPGVKLPPSLQNIYKELYDDVGCVPVQHGYLK
KWADQGVLLLNAVLTVPYGHANGHQGKGWEQVTDAAIKALSDRGQVVFILWGKYA
QNKIALIDQEKNYVIKSAHPSPFSADRGFFGSRPFSRCNEALKKFGEAPIDWQLPQQ
VTESDLA
SEQ ID NO: 339
>tr|A0A519N079|A0A519N079_FLASP Uracil-DNA glycosylase OS = Flavobacterium
sp. OX = 239 GN = ung PE = 3 SV = 1
MKIEESWKKELQSEFEKPYFKELREFISREFDAENGKTCYPPESQIFSAFDHCPFDE
VKVVIIGQDPYHGPGQANGLCFSVADGIPIRPSLRNIFVEIKNDLGKPIPATGNLERW
ANQGVLLLNATLTVRQGEAGSHQKQGWETFTDAVIQHISDDRQNVVFLLWGAFAQ
QKGKNIDKSKHCVLTSGHPSPMSANQGKWFGNKHFSKANEYLKSKGLPEIDW
SEQ ID NO: 340
>tr|A0A1H3TI78|A0A1H3TI78_9BURK Uracil-DNA glycosylase OS = Delftia lacustris
OX = 558537 GN = ung PE = 3 SV = 1
MALQDDAIAPAQADQLQSADPADWPVAPDWQPLVEDFFAGATGQQLLTFLHQRLE
AGAVIFPPQPLRALELTPPDEVRVVILGQDPYHGRGQAEGLSFSVAPGVRMPPSLQ
NIFKEMQRDLGVPFPPFPNPGGSLVKWARNGVLLLNTCLTVEEGQAASHSGKGWE
LLTDAVIRHIAQGTRPVVFMLWGSHAQSKRAFIPGDRGHLVLTSNHPSPLSALRPPV
PFIGNGHFGKARDFRAQHGY
SEQ ID NO: 341
>tr|A0A3D4RH89|A0A3D4RH89_9LACT Uracil-DNA glycosylase OS = Lactococcus
garvieae OX = 1363 GN = ung PE = 3 SV = 1
MKKTDWSGPLRERLPQEYFSDLVDFINEVYAKGNVYPPEDKIFRAIELTALSDVKVIL
VGQDPYPQPGKAQGLSFSYPASFVVNRPDSIVNIRKELQSEGFDKKDSDLTHWAE
QGVLLLNAVLTVPEMKSNAHKGKIWEPLTDEIIKIASDDARPKVFLLWGGDARKKAK
LIDSSKHLVLESAHPSPLSASRGFFGSQPFSKANAFLEKTGQKGIDWSK
SEQ ID NO: 342
>tr|A0A2Z6T8A7|A0A2Z6T8A7_9LACO Uracil-DNA glycosylase OS = Lactobacillus
rodentium OX = 947835 GN = ung PE = 3 SV = 1
MKNLIGNDWDEILAPVFQSENYQELHNFLKEEYQTKTIYPDMYHIFTAFKLTPFAKTK
VVILGQDPYHNPGQATGMSFSVNPGIALPPSLKNIYKELYDDVGAVPVDHGYLKKW
ADQGVLLLNAVLTVPYGKANGHQGKGWEFVTDQAIKRLSERGNVVFILWGRFAQN
KIPLIDQNKNFIIKSSHPSPFSADRGFFGSRPFSRCNDALKQFNEAPIDWQLPAKVNR
TEIV
SEQ ID NO: 343
>sp|Q53HV7|SMUG1_HUMAN Single-strand selective monofunctional uracil DNA
glycosylase OS = Homo sapiens OX = 9606 GN = SMUG1 PE = 1 SV = 2
MPQAFLLGSIHEPAGALMEPQPCPGSLAESFLEEELRLNAELSQLQFSEPVGIIYNP
VEY
AWEPHRNYVTRYCQGPKEVLFLGMNPGPFGMAQTGVPFGEVSMVRDWLGIVGPV
LTPPQEHPKRPVLGLECPQSEVSGARFWGFFRNLCGQPEVFFHHCFVHNLCPLLF
LAPSGRNLTPAELPAKQREQLLGICDAALCRQVQLLGVRLVVGVGRLAEQRARRAL
AGLMPEVQVEGLLHPSPRNPQANKGWEAVAKERLNELGLLPLLLK
SEQ ID NO: 344
>sp|Q811Q1|SMUG1_RAT Single-strand selective monofunctional uracil-DNA
glycosylase OS = Rattus norvegicus OX = 10116 GN = Smug1 PE = 2 SV = 1
MAVSQTFPPGPAHEPASALMEPCARSLAEGFLEEELRLNAELSQLQFPEPVGVIYN
PVDYAWEPHRNYVTRYCQGPKEVLFLGMNPGPFGMAQTGVPFGEVNVVRDWLGI
GGSVLSPPQEHPKRPVLGLECPQSEVSGARFWGFFRTLCGQPQVFFRHCFVHNL
CPLLFLAPSGRNLTPADLPAKHREQLLSICDAALCRQVQLLGVRLVVGVGRLAEQR
ARRALAGLTPEVQVEGLLHPSPRSPQANKGWETAARERLQELGLLPLLTDEGSVRP
TP
SEQ ID NO: 345
>sp|Q6P5C5|SMUG1_MOUSE Single-strand selective monofunctional uracil DNA
glycosylase OS = Mus musculus OX = 10090 GN = Smug1 PE = 1 SV = 1
MAASQTFPLGPTHEPASALMEPLPCTRSLAEGFLEEELRLNAELSQLQFPEPVGVIY
NPVDYAWEPHRNYVTRYCQGPKEVLFLGMNPGPFGMAQTGVPFGEVNVVRDWL
GVGGPVLTPPQEHPKRPVLGLECPQSEVSGARFWGFFRTLCGQPQVFFRHCFVH
NLCPLLFLAPSGRNLTPAELPAKQREQLLSICDAALCRQVQLLGVRLVVGVGRLAEQ
RARRALAGLTPEVQVEGLLHPSPRSAQANKGWEAAARERLQELGLLPLLTDEGSA
RPT
SEQ ID NO: 346
>sp|Q9YGN6|SMUG1_XENLA Single-strand selective monofunctional uracil DNA
glycosylase OS = Xenopus laevis OX = 8355 GN = smug1 PE = 1 SV = 1
MAAEACVPAEFSKDEKNGSILSAFCSDIPDITSSTESPADSFLKVELELNLKLSNLVF
QD
PVQYVYNPLVYAWAPHENYVQTYCKSKKEVLFLGMNPGPFGMAQTGVPFGEVNH
VRDWLQIEGPVSKPEVEHPKRRIRGFECPQSEVSGARFWSLFKSLCGQPETFFKH
CFVHNHCPLIFMNHSGKNLTPTDLPKAQRDTLLEICDEALCQAVRVLGVKLVIGVGR
FSEQRARKALMAEGIDVTVKGIMHPSPRNPQANKGWEGIVRGQLLELGVLSLLTG
SEQ ID NO: 347
>sp|Q59l47|SMUG1_BOVIN Single-strand selective monofunctional uracil DNA
glycosylase OS = Bos taurus OX = 9913 GN = SMUG1 PE = 2 SV = 1
MAVPQPFPSGPHLQPAGALMEPQPSPRSLAEGFLQEELRLNDELRQLQFSELVGIV
YNPVEYAWEPHRSYVTRYCQGPKQVLFLGMNPGPFGMAQTGVPFGEVSVVRDWL
GLGGPVRTPPQEHPKRPVLGLECPQSEVSGARFWGFFRNLCGQPEVFFRHCFVH
NLCPLLLLAPSGRNITPAELPAKQREQLLGVCDAALCRQVQLLGVRLVVGVGRVAE
QRARRALASLMPEVQVEGLLHPSPRSPQANKGWEAVAKERLNELGLLPLLTS

### OTHER EMBODIMENTS

[0204] It is to be understood that while the invention has been described in conjunction with the detailed description thereof, the foregoing description is intended to illustrate and not limit the scope of the invention, which is defined by the scope of the appended claims. Other aspects, advantages, and modifications are within the scope of the following claims.

The application's sequence listing, which the Patent Office published only in electronic form, follows.

SEQUENCE LISTING (357 sequences)

SEQ ID NO: 1 - protein, 223 aa, Loxodonta africana
FRRRIKPWEFEIFFDPRQLRKETCLLYEIKWGTSHKVWRNSGQNTTKHVEVNFIEKFTSERKLCPSISCSITWFLSWSPCWECSKAIREFLRQHPNVTLVIYVARLFHHMDQRNRQGLKDLILSGITVQIMRVSEYHHCWRNFVSYSPGEETYWPRYPPLWMMMYALELHCIILSLPPCLKISRRCQHQLTLFSLTPQKCHYQMIPPYILLATGLIEPPMTWR

SEQ ID NO: 2 - protein, 201 aa, Protopterus annectens
MVQKRTSASKTRMTKKVLLSEYQKFYYSPRTCIGYVIQYDEDNVIFQNWICNKRTTHAELQCIYEIKQNSLIKRFTPCTLKWYMSWTPCSECANEIIRFLNKFCQVKLEICAARIYFHKKKDNRRALRNLVKAGVKLTTMRWKDYKSMWRRFGTGEEIKKYEFFEKSSDHKSVNWRWTLKKILKEKDRDSDLENALSLLKI

SEQ ID NO: 3 - protein, 198 aa, Alligator mississippiensis
MAVEEEKGLLGTSQGWKIELKDFQENYMPSTWPKVTHLLYEIRWGKGSKVWRNWCSNTLTQHAEVNCLENAFGKLQFNPPVPCHITWFLSWSPCCQCCRRILQFLRAHSHITLVIKAAQLFKHMDERNRQGLRDLVQSGVHVQVMDLPDYRYCWRTFVSHPHEGEGDFWPWFFPLWITFYTLELQHILLQQHALSYNL

SEQ ID NO: 4 - protein, 182 aa, Anolis carolinensis
KAAILLSNLFFRWQMEPEAFQRNFDPREFPECTLLLYEIHWDNNTSRNWCTNKPGLHAEENFLQIFNEKIDIKQDTPCSITWFLSWSPCYPCSQAIIKFLEAHPNVSLEIKAARLYMHQIDCNKEGLRNLGRNRVSIMNLPDYRHCWTTFVVPRGANEDYWPQDFLPAITNYSRELDSILQD

SEQ ID NO: 5 - protein, 142 aa, Corvus brachyrhynchos
RWKIEPGDFQINYSPSQHRRGVYLLYEIRWRRGSIWRNWCSNTHRQHAEVNFLENCFKDRPQVPCSITWFLSASPCGKCSKRILEFLKSRPYVTLKIYAAKLFRHHDIRNREGLCNLGMHGVTIHIMNLEDYSYCWRNFVVY

SEQ ID NO: 6 - protein, 142 aa, Calypte anna
RWKIQPNDFKRNYQPGRRPNVVYLLYEIRWRRGTIWRNWCSNEFPQHAEDNFFQNRFNAVPSVSCSITWFLSTTPCGRCSKRILEFLRLHPNVTLKIYAARLFRHLDNRNRQGLRKLASNGVIIQIMGLPDYSYSWKKFVAY

SEQ ID NO: 7 - protein, 237 aa, Tursiops truncatus
MIICWSTGPSAGDATLRRRIEPWEFEVSFDPRELSKETRLLYEIKWGKSQRIWRHSGKNTTKHVERNFIEQITSERRFHRSVSCCIIWFLSWSPCWECSEAIREFLKQHPRVTLLIYVARLFQHMDPRNRQGLRDLTHSGVTIQIMGPTEYDYCWRYFVNYAPGKEAHWPRYPPLLMKLYALELHCIILGLPPCLNISRYQNQLTLFRPILRNCHYQMIPPHILLHTGLIQLPLTWR

SEQ ID NO: 8 - protein, 142 aa, Tyto alba
RWKIQPNDFKRNFLPGQHPKVVYLMYEIRWIRGTAWRSWCSNNSKQDAEVNLLENCFKAMPSVFCSVTWVLFTTPCGKCFRRILEFLRVHSNVALERYAAQLFRHLDICNWQGIRSLAMNGVIIHIMNLADYSYCWKRFVAY

SEQ ID NO: 9 - protein, 244 aa, Pteropus alecto
MWVLFDILISWSTGPSTGDPTLRRRIEPWEFEVFFDPRELRKEACLLYEIQWGTSHKIWRNSGKNTTKHVELNFIEKFTSERHFCSSVSCSIIWFLSWSPCWECSKAIREFLSQRPTVTLVIFVSRLFQHMDQQNRQGLRDLINSGVTIQIMRASEYDHCWRNFVNYPPGKEAHWPRYPPLWMKLYALELHCIILSLPPCVMISRRCQKQLTLFTLILKKCHYQMIPAHILLATGLIQVPVTWR

SEQ ID NO: 10 - protein, 236 aa, Rhinopithecus bieti
MTSEKGPSTGDPTLRRRIEPWEFDIFYDPRELRKEACLLYEIKWGMSWKIWRSSGKNTTNHVEVNFIEKFTSERRFHSSISCSITWFLSWSPCWDCSQAIRKFLSQHPGVTLVIYVARLFWHTDQQNRQGLRDLVNSGVTIQMMTASEYYHCWRNFVNYPPGEEAHWPRYPPLWMMLYALELHCIILSLPPCLKISRRWQNHLTFFRLHLQNCHYQTIPPHILLATGLIQPSVTWR

SEQ ID NO: 11 - protein, 237 aa, Delphinapterus leucas
MIICWSTGPSAGDATSRRRIEPWEFEVSFDPRELCKETRLLYEIKWGKSQHVWRHSDKNTTKHVECKFIEKITSERHFHPSVSCCIIWFLSWSPCWECSKAIREFLNQHPRVTLFIYVARLFQHMDPQNRQGLRDLIHSGVTIHVMGPTEYDYCWRNFVNYPPGKEAHWPRYPPMLMKLYALELHCIILGLPPCLNISRYQNQLTLFRLIPQNCHYRMIPPHILLHRGLIRLPLTWR

SEQ ID NO: 12 - protein, 184 aa, Lonchura striata
MYRRKMRGMYISKRALRKHFDPRNYPRETYLLCELQWRGSHKSWQHWLRNDDSKDCHAEKYFLEEIFEPRSYNICDMTWYLSWSPCGECCDIIQDFLEEQPNVNINIRIARLYYADRASNRRGLMELANSPGVSIEIMDADDYNDCWETFIQPGVYYRFSPENFESAIRRNCSQLEDILQGLHL

SEQ ID NO: 13 - protein, 295 aa, Amazona aestiva
  MOD_RES (27)..(27): Any amino acid
  MOD_RES (87)..(87): Any amino acid
  MOD_RES (182)..(182): Any amino acid
  MOD_RES (201)..(201): Any amino acid
MLPAPAPVPLVLPLQGGGVVVVTVGVXPTALLQPSGAPEVARTFVGAVIAFVIAEYVDTSVSEDTTICGMYIPKEALKYHFDPREVXRDTYLLCILRWGETGTPWSHWVKNYRYHAEVYFLEKIFQTRKSSKNINCSITWYLSWSPCAKCCRKILNFLKKHSYVSIKIHVARLFRIDDKETXQNLKNLGSLVGVTVSVMEXEDYTNCWKTFIRGHADGDSWIDDLKSEIRKNRLKFQGIFKDLPHQTEDVDFWLILAANPGPAWFSFSGYTGWAVASKAPSLLSPLSCLTRLLTP

SEQ ID NO: 14 - protein, 177 aa, Saimiri boliviensis
MTSERRRIEPWEFSISYDPRELCKETCLLYEIKWGMSWKIWRSSGKNTTNHVEVNFIEKFTSERHFHSSVSCSITWFLSWSPCWECSQAIREFLSQHPGVTLVIYVARLFQHMDQQNRQGLRELVNSGVTIQIMTASEYYHCWRNFVNYPPGEEAHWPRHPPLWMMLYALELHCIIL

SEQ ID NO: 15 - protein, 218 aa, Pan paniscus
ISWSTGPSTGDPTLRRRIEPWEFDVFYDPRELRKEACLLYEIKWGMSRKIWRSSERDFHPSISCSITWFLSWSPCWECSQAIREFLSQHPGVTLVIYVARLFWHMDQQNRQGLRDLVNSGVTIQIMTASEYYHCWRNFVNYPPGDEAHWPQYPPLWMMLYALELHCIILSLPPCLKISRRWQNHLTFFSLHLQNCHYQTIPPHILLATGLIHPSVAWR

SEQ ID NO: 16 - protein, 236 aa, Pongo pygmaeus
MTSEKGPSTGDPTLRRRIESWEFDVFYDPRELRKETCLLYEIKWGMSRKIWRSSGKNTTNHVEVNFIKKFTSERRFHSSISCSITWFLSWSPCWECSQAIREFLSQHPGVTLVIYVARLFWHMDQRNRQGLRDLVNSGVTIQIMRASEYYHCWRNFVNYPPGDEAHWPQYPPLWMMLYALELHCIILSLPPCLKISRRWQNHLAFFRLHLQNCHYQTIPPHILLATGLIHPSVTWR

SEQ ID NO: 17 - protein, 236 aa, Bos taurus
MASDRGPPAGDPTLRRRIEPWEFEFSFDPRKFCKEACLLYEIQWGNNRDVWRHSGKNTTKHVERNFIEKIASERYFCPSIRCFIFWYLSWSPCWECSKAIREFLNQHPNVTLVIYIARLFQHMDPQNRQGLKDLVQSGVTIQVMRAPEYEYCWRNFVNYPRGKEAHWPRYPPLWMNLYALELYCIILGLPPCLHISRRYQNQLIVFRLTLQNCHYQMIPPYILLATGMVQLPMTWR

SEQ ID NO: 18 - protein, 107 aa, Myotis brandtii
MDEQNRQGLRDLIKSGVTVQIMTTPEYDYCWRNFVNYPPGKDTHCPMYPPLWMKLYALELHCIILSLPPCLMISRRCQKQLTWYRLNLQNCHYQQIPHHILLATVWI

SEQ ID NO: 19 - protein, 236 aa, Felis catus
MASDKGPSAGDATLRRRIEPREFEVFFDPRELRKEACLLYEIKWGTSHRIWRNSGRNTANHVELNFIEKFTSERHFCPSVSCSITWFLSWSPCWECSKAIRGFLSQHPSVTLVIYVSRLFWHLDQQNRQGLRDLVNSGVTVQIMRVPEYDHCWRNFVNYPPGEEDHWPRYPVVWMKLYALELHCIILSLPPCLKILRRCQNQLTLFRLTLQNCHYQMIPPHILLATGLIQLPVTWR

SEQ ID NO: 20 - protein, 236 aa, Cebus capucinus
MTSERGPSTGDPTLRRRIEPWEFYISYDPKELCKETCLLYEIKWGMSWKIWRSSGKNTTNHVEVNFIEKFTSERRFHSSISCSITWFLSWSPCWECSQAIREFLSQHPGVTLVIYVARLFQHMDQQNRQGLRDLVNSGVTIQIMRASEYYYCWRNFVNYPPGEEAHWPRHPPLWMMLYALELHCIILGLPPCLKISRRRQNRLTFFRLHLQNCHYQMIPPHILLAAGLIQPSVTWR

SEQ ID NO: 21 - protein, 236 aa, Pan troglodytes
MTSEKGPSTGDPTLRRRIEPWEFDVFYDPRELRKEACLLYEIKWGMSRKIWRSSGKNTTNHVEVNFIKKFTSERHFHPSISCSITWFLSWSPCWECSQAIREFLSQHPGVTLVIYVARLFWHMDQQNRQGLRDLVNSGVTIQIMRASEYYHCWRNFVNYPPGDEAHWPQYPPLWMMLYALELHCIILSLPPCLKISRRWQNHLTFFSLHLQNCHYQTIPPHILLATGLIHPSVAWR

SEQ ID NO: 22 - protein, 238 aa, Alligator sinensis
MGEHWQYAGSGEYIPQDQFEENFDPSVLLAETHLLSELTWGGRPYKHWYENTEHCHAEIHFLENFSSKNRSCTITWYLSWSPCAECSARIADFMQENTNVKLNIHVARLYLHDDEHTRQGLRYLMKMKRVTIQVMTIPDYTYCWNTFLEDDGEDESDDYGGYAGVHEDEDESDDDDYLPTHFAPWIMLYSLELSCILQGFAPCLKIIQGNHMSPTFQLHVQDQEQKRLLEPANPWGAD

SEQ ID NO: 23 - protein, 86 aa, Cricetulus griseus
MTEQEYCYCWRNFVNYPPSNEVYWPRYPNVWMRMYALELYCIVLGLPPCLKIIRRHQHPLTFFTLHLQSCHYQRIPPHILWATGLV

SEQ ID NO: 24 - protein, 142 aa, Antrostomus carolinensis
RWKMQPNDFKRNYLPVQYPNMVYLLYEIRWSTGTIWRNWCSNNSTQHAEVNFLENRFNSRPSVSCSITWVLSTTPCGKCSTKILEFLRLHPNVTLKIYAAKLFKHLDIRNRQGLRNLAMNGVIIRIMNLADYSYCWKTFVAY

SEQ ID NO: 25 - protein, 226 aa, Propithecus coquereli
MTSEKRRIEPWEFEAFFDPRELRKEACLLYEIKWGASHKIWRNTGKSTTRHVEVNFIEKFTSERRSDSLISCSITWFLSWSPCWECSKAIREFLSQHPNVTLVIYVARLFWHMNQQNRQGLRDLINSGVTVQIMGVSEYCHCWRNFVNYPPGKEASCPTYPPLWMTLYALELHCIILSLPPCLKISRRCQNQLTFFRLTPQNCHYQTIPPHILLATGLIQPSVTWR

SEQ ID NO: 26 - protein, 231 aa, Macaca fascicularis
GPSTGDPTLRRRIEPWEFDIFYDPRELRKEACLLYEIKWGMSPKIWRSSGKNTTNHVEVNFIEKLTSERRFHSSISCSITWFLSWSPCWECSQAIREFLSQHPGVTLVIYVARLFWHTDQQNRQGLRDLVNSGVTIQIMRASEYYHCWRNFVNYPPGEEAHWPRYPPLWMMLYALELHCIILSLPPCLKISRRWQNHLTFFRLHLQNCHYQMIPPHILLATGLIQPSVTWR

SEQ ID NO: 27 - protein, 142 aa, Nipponia nippon
RWKIQPNDFRSNYLPCQHPRVVYLLYEIRWSRGTIWRNWCSNNSTQHAEVNFLENCFKAMPSVPCSITWVLSTTPCGKCSRRILEFLRVHPNVTLEIYAAKLFKHLDIRNRQGLRNLAKNGVVIRIMKLADYSYWWKRFVAY

SEQ ID NO: 28 - protein, 142 aa, Pelecanus crispus
RWKLQPEDFKRNYLPGQHPKVVYLLYEIRWSRGTIWRSWCSNNSKQHAEVNFLENCFKARPSVSCSITWVLSTTPCGKCSRRILEFLRVHPNVTLEIYAAKLFKHLDIRNQQGLRNLAMNGVIIRIMNLADYSYCWKRFVAH

SEQ ID NO: 29 - protein, 93 aa, Fukomys damarensis
MSDPEFCHCWRNFVNYPPGQEARWPRFPPVWTMLYTLELCCVLLNLPPCLKISRRCHNQLAFFQLNLQNCHYRAIPPAVLFAVGLIHPFVAWA

SEQ ID NO: 30 - protein, 240 aa, Myotis davidii
MASDAGKMDRGPVSFIVLKSVETLCVRRIEPWEFEAIFDPRELRKEACLLYEIKWGTGHKIWRHSGKNTTRHVEVNFIEKITSERQFCSSTSCSIIWFLSWSPCWECSKAITEFLRQRPGVTLVIYVARLYHHMDEQNRQGLRDLVKSGVTVQIMTTPEYDYCWRNFVNYPPGKDTHCPIYPPLLMKLYALELHCIILSLPPCLMISRRCQKQLTWYRLNLQNCHYQQIPHHILLATAWI

SEQ ID NO: 31 - protein, 236 aa, Canis lupus familiaris
MASDKGPSAGDATLRRRIEPWEFEGFFDPRELRKETCLLYEIQWGTSHKTWRNSGKNTTNHVEINFMEKFAAERQYCPSIRCSITWFLSWSPCWECSNAIRGFLSQHPSVTLVIYVARLFWHTDPQNRQGLRDLINSGVTIQIMTVPEYDHCWRNFVNYPPGKEDHWPRYPVLWMKLYALELHCIILNLPPCLKISRRNQHQLTLFRLTLQDCHYQTIPPPILLDMGLIQPLVTWR

SEQ ID NO: 32 - protein, 142 aa, Dryobates pubescens
RWKIHPDEFKLNYVPVGRPRVVYLLYEIRWSRGSIWRNWCSNSSTQHAEVNFLENCFKAMPSVSCSITWFLSTTPCGNCSRRILEFLRAHPKVTLAIHAAKLFKHLDVRNRHGLKALATDGVVLHIMSIADYRYCWTKFVAY

SEQ ID NO: 33 - protein, 236 aa, Mandrillus leucophaeus
MTSEKGPSTGDPTLRRRIEPWEFDIFYDPRELRKEACLLYEIKWGMSPKIWRSSGKNTTNHVEVNFIEKLTSERRFHSSISCSITWFLSWSPCWECSQAIREFLSQHPGVTLVIYVARLFWHTDQQNRQGLRDLVNSGVTIQIMRASEYYHCWRNFVNYPPGEEAHWPRYPPLWMMLYALELHCIILSLPPCLKISRRQQNHLTFFRLHLQNCHYQTIPPHILLATGLIQPSVTWR

SEQ ID NO: 34 - protein, 142 aa, Balearica regulorum
RWKIQPDDFKRNYLPGKHPRVVYLLYEIRWSRGTIWRSWCSNNATQHAEINFLETCFLARTSVSCSITWVLSTTPCGKCSRRILEFLNAYPNVTLEIYAAKLFRHLDNRNRQGLRNLAMKGVRIHIMNLADYSYFWKIFVAY

SEQ ID NO: 35 - protein, 142 aa, Aptenodytes forsteri
RWKIRPNDFKRNYLPGQHPKVVYLLYEIRWSRGTIWRNWCSNNSTQHAEVNFLENCFKAMPSVSCSITWVLSTTPCGKCSRRILEFLRVHPNVTLEIYAAKLFKHLDIRNRQGLRNLAMNGVIIRIMNLADYSYGWKRFVAY

SEQ ID NO: 36 - protein, 236 aa, Enhydra lutris
MASDKGPSAGDATLRRRIEPWEFEVFFDPRELRKEACLLYEIQWGTSHKMWRNTGKNTANHVELNFIEKFTSERRYCPSTHCSITWFLSWSPCWECCKAIRGFLSQHPSVTLVIYVTRLFWHMDPQNRQGLRDLLKSGVTVQIMRAPEYDHCWKNFVNYPPGKEDHWPRYPELWMKLYELELYCIILSLPPCLKISRRNQNQLTLFRLTLQNCHYQIIPPHILLDTGLIQLPVIWR

SEQ ID NO: 37 - protein, 236 aa, Mustela putorius
MASDKGPSAGDATLRRRIEPWEFEVFFDPRELRKEACLLYEIQWGTSHKMWRNTGKNTANHVELNFIEKFTSERRYCPSTHCSITWFLSWSPCWECSKAIRGFLSQCPSVTLVIYVTRLFWHMDPQNRQGLRDLLKSGVTVRIMRAPEYDHCWKNFVNYPPGKEDHWPRYPELWMKLYELELYCIILSLPPCLKISRRNQKQLTLFRLTLQNCHYQIIPPHILLDTGLIQLPVIWR

SEQ ID NO: 38 - protein, 248 aa, Trichechus manatus
MTSEEADQRHSTMTSEKGPSTGDGTLRRRITPWEFEIFFDPRELRKETCLLYEIKWGTSHRIWRNSGQNTTKHAEVNFIEKFTSERNFCPSVSCSITWFLSWSPCWECSKAIREFLSQHPNVILVIYVARLFHHMDQQNREGLRDLVLSGVTVQIMSVSEYGHCWRNFVNYPPGEEARWPRYPPLWMMLYALELHCIILGLPPCLKISRRRQSQLTLFSLTPQNCHYQMIPPHILLATGLIQPYVTWR

SEQ ID NO: 39 - protein, 235 aa, Ailuropoda melanoleuca
ISWSTGPSGGDATSRRRIEPWEFEVFFDPRQLRKEACLLYEIQWGTSRKIWRNSGKNTTNHVEINFIEKFTLERQYCPSIHCSVTWFLSWSPCWECSKAIRAFLSQHPSVTLVIYVARLFWHMEPQNRQGLRDLINSGVTIQIMSVPEYDHCWRNFVNYPPGKDHWPGYPVLWMKLYALELHCIILSLPPCLKISRRNQNQLTLFRLTLQNCHYQTIPPHVLLATGLIQLPVTWR

SEQ ID NO: 40 - protein, 142 aa, Manacus vitellinus
RWKIQPKDFKRNYLPGQHPQVVYLLYEIRWRNGSIWRNWFSNNRNQHAEVNFLENCFSDVPPAPCSITWFLSTSPCGKCSRRILEFLRTHRNVTLEIYAAKLFRHQDIRNRQGLCNLVMNGVTIHIMNLADYSYCWKRFVAY

SEQ ID NO: 41 - protein, 229 aa, Mesocricetus auratus
MSSETGPVVVDPTLRRRIEPHEFDAFFDQGELRKETCLLYEIRWGGRHNIWRHTGQNTSRHVEINFIEKFTSERYFYPSTRCSIVWFLSWSPCGECSKAITEFLSGHPNVTLFIYAARLYHHTDQRNRQGLRDLISRGVTIRIMTEQEYCYCWRNFVNYPPSNEVYWPRYPNLWMRLYALELYCIHLGLPPCLKIKRRHQYPLTFFRLNLQSCHYQRIPPHILWATGFI

SEQ ID NO: 42 - protein, 191 aa, Rhinopithecus roxellana
MSWKIWRSSGKNTTNHVEVNFIEKFTSERRFHSSISCSITWFLSWSPCWDCSQAIRKFLSQHPGVTLVIYVARLFWHTDQQNRQGLRDLVNSGVTIQMMTASEYYHCWRNFVNYPPGEEAHWPRYPPLWMMLYALELHCIILSLPPCLKISRRWQNHLTFFRLRLQNCHYQTIPPHILLATGLIQPSVTWR

SEQ ID NO: 43 - protein, 191 aa, Chlorocebus sabaeus
MSRKIWRSSGKNTTNHVEVNFIEKLTSERRFHSSVSCSVTWFLSWSPCWECSQAIREFLSQHPGVTLVIYVARLFWHTDQQNRQGLRDLVNSGVTIQIMRASEYYHCWRNFVNYPPGEEAHWPRYPPLWMMLYALELHCIILSLPPCLKISRRWQNHLTFFRLHLQNCHYQTIPPHILLATGLIQPPVTWR

SEQ ID NO: 44 - protein, 236 aa, Cavia porcellus
MASGTGPSTGDATLRRRIEPWQFEAYFDPRQLRKEACMLSEVRWGASPRTWRESSLNTTSHVEINFIEKFTSGRSLRPAVRCSMTWFLSWSPCWECARAIREFLHQHPNVSLVIYVARLYWHVDEQNRQGLRDLVTSGVRVQIMSDSEYRHCWRNFVNFPPGQEAGWPRFPPMWTTLYALELSCILLSLPPCLKISRRRQYRLIVFQLILQTCHYRAIPPQVLSAAELMHPLVAWC

SEQ ID NO: 45 - protein, 235 aa, Neomonachus schauinslandi
MASDKGPSAGDATLRRRIKPWEFEVFFDPRELRKETCLLYEIQWGTSHKIWRNSGKNTANHVEINFIEKFTSERQYCPSIRCSITWFLSWSPCWECSKAIRGFLSQHPSVTLVIYVARLFWHMDPQNRQGLRDLINSGVTIQIMRVPEYDHCWRNFVNYLPGKEDHWPRYPVLWMKLYALELHCIILSLPPCLRISRRQNQLTLFTLTLQNCHYQMIPPHILLATGLIQVPVTWK

SEQ ID NO: 46 - protein, 142 aa, Opisthocomus hoazin
RWKVQPNDFKRNYLPGQHPKVVYILYEIRWSRGTIWRNWCTNNSTQHAEVNFLENCFKAMPSVSCSITWVLSTTPCGKCSKRIQDFLRIYPNVTLEIHAAKLFKHLDTRNREGLRNLAKDGVIIHIMNLADYSYWWKRFVAY

SEQ ID NO: 47 - protein, 191 aa, Equus caballus
MSHNIWRYSGKNTTKHVEINFIEKFTSERHLRPSISCSIVWFLSWSPCWECSKAIREFLSQHPNVTLVIYVARLFQHMDRLNRQGLRDLINSGVTIQIMRTSEYDHCWRNFVNYPPGKEAHWPRYPLLWMKLYALELHCIILSLPPCLMISRRCQNQLTFFRLTLQNCHYQMIPPHILLATGLVQLPVTWR

SEQ ID NO: 48 - protein, 236 aa, Homo sapiens
MTSEKGPSTGDPTLRRRIEPWEFDVFYDPRELRKEACLLYEIKWGMSRKIWRSSGKNTTNHVEVNFIKKFTSERDFHPSMSCSITWFLSWSPCWECSQAIREFLSRHPGVTLVIYVARLFWHMDQQNRQGLRDLVNSGVTIQIMRASEYYHCWRNFVNYPPGDEAHWPQYPPLWMMLYALELHCIILSLPPCLKISRRWQNHLTFFRLHLQNCHYQTIPPHILLATGLIHPSVAWR

SEQ ID NO: 49 - protein, 142 aa, Nestor notabilis
RWKIQPNDFKRNYLPYQHPKVVCLLYEIRWNRGTIWRSWCSNNSTQHAEVNFLENCFKAKPSVSCSITWVLSTTPCGECSRRILDFLSVYPNVTLKIYAAKLFKHLDNRNRQGLWNLANNRVIIRIMNLEDYNYYWKRFVAY

SEQ ID NO: 50 - protein, 142 aa, Egretta garzetta
RWKIQPNDFKRNYLPGQHPKVVYLLYEIRWSRGTIWRNWCSNNSTQHAEVNFLENCFKAMPSVSCSITWVLSTTPCGKCSRRILEFLRVHPSVTLEIYAAKLFKHLDIRNRQGLRNLAMNGVIIHIMNLADYSYWWKIFVAY

SEQ ID NO: 51 - protein, 248 aa, Aotus nancymaae
MTPEEEVQRQSTMTSERGPSTGDPTLRRRIEPWEFCISYDPKELCKETCLLYEIKWGTSWKIWRSSGKNTTNHVEVNFIEKFMSERHFHSSISCSITWFLSWSPCWECSQAIREFLSRHPGVTLVIYVARLFQHMDRQNRQGLRDLVNSGVTIQIMRASEYYHCWRNFVNYPPGEEAHWPRYPPLWMMLYALELHCIILGLPPCLKISRRWQNRLTFFRLHLQNCHYQMIPQHILFATGLIQPPVTWR

SEQ ID NO: 52 - protein, 229 aa, Mus musculus
MSSETGPVAVDPTLRRRIEPHEFEVFFDPRELRKETCLLYEINWGGRHSVWRHTSQNTSNHVEVNFLEKFTTERYFRPNTRCSITWFLSWSPCGECSRAITEFLSRHPYVTLFIYIARLYHHTDQRNRQGLRDLISSGVTIQIMTEQEYCYCWRNFVNYPPSNEAYWPRYPHLWVKLYVLELYCIILGLPPCLKILRRKQPQLTFFTITLQTCHYQRIPPHLLWATGLK

SEQ ID NO: 53 - protein, 221 aa, Heterocephalus glaber
RRRIEPWQFEASFDPRQLRRETCLLSEVRWGTSPRAWRGCSLNTARHAEVSFMDRLTSEGRLRGPVRCSITWFLSWSPCGACAQAIGEFLRQHPNVSLVIYIARLFWHVDEQNRQGLRDLVTRGVRMQVMSDPEFAHCWRNFVNYSPGQEARWPQVPPVWTWLYSLELHCILLNLPPCLKISRRHHNQLTFFQLILQNCHYQAIPSPVLLASGLIHPFVTW

SEQ ID NO: 54 - protein, 142 aa, Merops nubicus
RWKIEPDEFKTNYSPDHRPRVVYLLYEIRWRRGTIWRNWCSNNIDQHAEVNFLENCFKAKPSVSCSITWFLSTAPCAKCSRRILKFLTAHPKVTLEIYAAKLFRHLEIRNRQGLMDLAVNGVILRIMNLADYSYCWKQFVAY

SEQ ID NO: 55 - protein, 142 aa, Fulmarus glacialis
RWKIQPNDFKRNFLPSKYPKVVYLLYEIRWSSGTIWRSWCSNNSTQHAEVNFLENCFKAMPSVSCSITWVLPITPCGKCSKKILEFLSVHPNVTLEIYAAKLFRHLDIRNQQGLRNLAMNGVIIRIMNLADYSYSWKRFVAY

SEQ ID NO: 56 - protein, 236 aa, Nomascus leucogenys
MTSEKGPSTGDPTLRRRIEPWEFDVFYDPRELRKEACLLYEIKWGMSQKIWRSSGKNTTNHVEVNFIKKFTSEGRFQSSISCSITWFLSWSPCWECSQAIREFLSQHPGVTLVIYVARLFWHMDQQNRQGLRDLVNSGVTIQIMRASEYYHCWRNFVNYPPGDEAHWPRYPPLWMMLYALELHCIILSLPPCLKISRRWQNHLTFFRLHLQNCHYQTIPPHILLATGLIHPSVTWR

SEQ ID NO: 57 - protein, 236 aa, Papio anubis
MTSEKGPSTGDPTLRRRIEPWEFDIFYDPRELRKEACLLYEIKWGMSPKIWRSSGKNTTNHVEVNFIEKLTSERRFHSSISCSITWFLSWSPCWECSQAIREFLSQHPGVTLVIYVARLFWHTDQQNRQGLRDLVNSGVTIQIMTASEYYHCWRNFVNYPPGEEAHWPRYPPLWMMLYALELHCIILSLPPCLKISRRWQNHLTFFRLHLQNCHYQTIPPHILLATGLIQPSVTWR

SEQ ID NO: 58 - protein, 235 aa, Monodelphis domestica
MNSKTGPSVGDATLRRRIKPWEFVAFFNPQELRKETCLLYEIKWGNQNIWRHSNQNTSQHAEINFMEKFTAERHFNSSVRCSITWFLSWSPCWECSKAIRKFLDHYPNVTLAIFISRLYWHMDQQHRQGLKELVHSGVTIQIMSYSEYHYCWRNFVDYPQGEEDYWPKYPYLWIMLYVLELHCIILGLPPCLKISGSHSNQLALFSLDLQDCHYQKIPYNVLVATGLVQPFVTWR

SEQ ID NO: 59 - protein, 262 aa, Dipodomys ordii
MHHSARLPPNCIVSRYANAPWTVLPLPLPPTEAPATGDDTLRRRIEPWEFEAFFNPQELRREACLLYQITWSSHKVWRETAKNTVDSHVEVNFIQNLTAGRYCRPSTRCSILWFLSWSPCSSCSKAIRLFLSQHPGVSLVIYVARLFQHMDPQNRQGLRELIHSGVTIQVMRPQEYDYCWKNFVNYPPGQEEHWPRYPVQCMTLYNLELYCIIHNLPPCVRISKQRQSQLAFFSLGLENVHYQRIPPPLLLLTGLVFVFPWK

SEQ ID NO: 60 - protein, 235 aa, Odobenus rosmarus
MASDKGPSAGDATLRRRIEPWEFEVFFDPRELRKEACLLYEIQWGTSHKIWRNSGKNTSNHVEINFIEKFTSERQYCPSIHCSITWFLSWSPCWECSEAIRGFLSQHPSVTLVIYVARLFWHMDPQNRQGLRDLINSGVTIQIMRVPEYDHCWRNFVNYPPGKEDHWPRYPVLWMKLYALELHCIILSLPPCLRISRRQNQLTLFRLTLQNCHYQMIPPHILLATGLIQVPVTWK

SEQ ID NO: 61 - protein, 330 aa, Patagioenas fasciata
MRRKKPSGMYISKRALKDNFDPHKFPHDTYLLCKLQWGDTGRSWIHWIRKDRYHAEVYFLEKIFKMRRSKNYVNCSITWYLSWSPCVRCCCEILNFLEKHSYVNIDIYVARLYKIQNSEVREGLKKLVSSKKVTIAVMEIKDYTYCWKNFIQGDADDDSWTVDFQSAITKNRLKLKDVFEFLKSHPNVTLEIYAAKLFKHLDIRNREGLRNLAKNGVIIHIMNLADYSYWWKIFVTRQHGEDDYLPWSFALHIFLNCIEFQQILLVSRHLKESLRVKSNEKAQEKEVWRIPAMVLAEMIVGKMNRDLMLHEQRANRARNCKGLWCYIVPL

SEQ ID NO: 62 - protein, 230 aa, Colobus angolensis
PSTGDPTLRRRIEPWEFDIFYDPRELRKEACLLYEIKWGMSQKIWRSSGKNTTNHVEVNFIEKLTSERRFHSSVSCSITWFLSWSPCWECSQAIREFLSQHPGVTLVIYVARLFWHTDQQNRQGLRDLVNSGVTIQMMTASEYYHCWRNFVNYPPGEEAHWPRYPPLWMMLYALELHCIILSLPPCLKISRRWQNHLTFFRLHLQNCHYQTIPPHILLATGLIQPSVTWR

SEQ ID NO: 63 - protein, 198 aa, Tarsius syrichta
  MOD_RES (38)..(38): Any amino acid
MLTALMEEVQDTMRFGRRAFFLSNSVGIWVLFDISISXSTGPSMGDPTLRRRIEPWEFEVLFDPRELRKEACLLYEIKWGTSCKIWRNSGKNTSNHAEVNFLEKFTSERHFCSSTSYSITWFLSWSPCWECSRAIREFLSQHPRVTLVIYVARLFWHMEPQNRQGLRDLINSGVTIQIMRDSGKSNKQIIRIVCERTW

SEQ ID NO: 64 - protein, 236 aa, Sus scrofa
MASDRGPSAGDATSRRRIEPWEFEVFFDPRELRKETCLLYELQWGRSRDTWRHTGKNTTNHVERNFLAKITSERHFHPSVHCSIVWFLSWSPCWECSEAIREFLDQHPSVTLVIYVARLFQHMDPQNRQGLRDLVNHGVTIQIMGAPEYDYCWRNFVNYPPGKEAHWPRFPPVWMTLYALELHCIILGLPPCLKISRRCQNQLTFFRLTLQNCHYQTIPPHILLATGLIQLPVIYR

SEQ ID NO: 65 - protein, 236 aa, Macaca nemestrina
MTSEKGPSTGDPTLRRRIEPWEFDIFYDPRELRKEACLLYEIKWGMSPKIWRSSGKNTTNHVEVNFIEKLTSERRFHSSISCSITWFLSWSPCWECSQAIREFLSQHPGVTLVIYVARLFWHTDQQNRQGLRDLVNSGVTIQIMRASEYYHCWRNFVNYLPGEEAHWPRYPPLWMMLYALELHCIILSLPPCLKISRRWQNHLTFFRLHLQNCHYQMIPPHILLATGLIQPSVTWR

SEQ ID NO: 66 - protein, 236 aa, Oryctolagus cuniculus
MASEKGPSNKDYTLRRRIEPWEFEVFFDPQELRKEACLLYEIKWGASSKTWRSSGKNTTNHVEVNFLEKLTSEGRLGPSTCCSITWFLSWSPCWECSMAIREFLSQHPGVTLIIFVARLFQHMDRRNRQGLKDLVTSGVTVRVMSVSEYCYCWENFVNYPPGKAAQWPRYPPRWMLMYALELYCIILGLPPCLKISRRHQKQLTFFSLTPQYCHYKMIPPYILLATGLLQPSVPWR

SEQ ID NO: 67 - protein, 229 aa, Rattus norvegicus [sequence omitted]

SEQ ID NO: 68 - protein, 142 aa, Cariama cristata
RWKIQPDDFKRNYLPGQHPEVVYLLYEIKWNSGTIWRNWCSNNPTQHAEVNFLENHFNVMSSVSCSITWGISTTPCGKCSRRILEFLTTHPNVTLEIYAAKLFKHLDIRNRQGLRNLAMNGVVICIMNLADYSYFWKTFVAY

SEQ ID NO: 69 - protein, 142 aa, Gavia stellata
RWKIQPNDFKRNYLPAQHPKVVYLLYEIRWSRGTIWRNWCSNNSTQHAEVNFLENCFKAMPSVSCSITWFLSTTPCGKCSRRILTFLREHPNVTLEIYAAKLFKHLDVRNQQGLRNLDRNGVIIRIMNFADYSYCWKRFVAY

SEQ ID NO: 70 - protein, 231 aa, Macaca mulatta; identical to SEQ ID NO: 26

SEQ ID NO: 71 - protein, 142 aa, Acanthisitta chloris
RWKIQPNDFQRNYLPDQHPQAVYLLYEFRWRRGSIWRKWCSNNRAQHAEVNFLENCFNGIPPVPCSITWFLSTTPCGNCSRRILEFLRLHPNVTLEIYAAKLFRHTDIRNRKGLYNLAMNGVIIRIMNLADYSYCWRNFVAY

SEQ ID NO: 72 - protein, 197 aa, Columba livia
MAAVTNRDSACRENNQRWKIQPNDFRRNYLPDKQPRVVYLLYEIRWRRGTIWRNWCSNNPNQHAEVNFLKNYFNAMPSVSCSITWVLSTTPCGKCSIKIMEFLKLHPNVTLEIYAAKLFKHLDIRNREGLRNLAKNGVIIHIMNLADYSYWWKIFVTRQHGEEDYLPWSFALHIFLNCIEFQQILLGLPPLLPNFKY

SEQ ID NO: 73 - protein, 239 aa, Ovis aries
MASDRGPPAGDPTLRRRIEPLEFEFSFDPRNFCKEAYLLYEIQWGNSRDVWRHSGKNTTKHVERNFIEKIASERHFRPSISCSISWYLSWSPCWECSKAIREFLNQHPNVTLVIYIARLFQHMDPQNRQGLKDLFHSGVTIQVMRDPEYDYCWRNFVNYPQGKEAHWPRYPPLWMNLYALELYCIISGLPPCLQISRRHQNQLRVFRLIPQNCHYQMIPPCILLATGMIQLPVTWRWIE

SEQ ID NO: 74 - protein, 236 aa, Otolemur garnettii
ISWSTGISTGDPTLRRRIEPWEFEVFFDPRELRKETCLLYEIKWGTSHKIWRSTARNTTSHAEMNFIEKFTSERCSDAPISCSITWFLSWSPCWECSKAIREFVSRHPSVTLVIYVARLYWHMDQQNRQGLRDLISSGVTVQIMRVSEYCHCWRNFVNYLPGKEAHCPRCPPLWMTLYALELHCIILSLPPCLKISRGHQNQLTLFRLTLQNCHYQTIPPHVLLATGLIQPYVTWR

SEQ ID NO: 75 - protein, 205 aa, Stylophora pistillata
MASVTELRTPDDFLAELLWTGVTGRTWPNRTFLIVSIKAKDGKPIFGKRFKNRYPEHAEIIMLRNSNFSDVVEKNHDIDITLTLNYSPCSSCACILKEFYVNNSNIKCFTIQFSFIYYKEDMKNKTGLQNLEEAGVTLQAMNAESWREVGIDLESFTPEDKEKINKRDKDTANDLNEVLSSKQDQDASVDELSSQLNAKLRAKET

SEQ ID NO: 76 - protein, 248 aa, Cercocebus atys
MTPEEEVQRQSTMTSEKGPSTGDPTLRRRIEPWEFDIFYDPRELRKEACLLYEIKWGMSPKIWRSSGKNTTNHVEVNFIEKLTSERRFHSSISCSITWFLSWSPCWECSQAIREFLSQHPGVTLVIYVARLFWHTDQQNRQGLRDLVNSGVTIQIMRASEYYHCWRNFVNYPPGEEAHWPRYPPLWMMLYALELHCIILSLPPCLKISRRQQNHLTFFRLHLQNCHYQTIPPHILLATGLIQPSVTWR

SEQ ID NO: 77 - protein, 238 aa, Physeter macrocephalus
MIICWSTGPSAGDATSRRRIEPWEFEVSFDPREFCKEARLLYEIKWGKSQDVWRHSGKNTTKHVECNFIEKMTSERHFHPSISCCIIWFLSWSPCWECSKAIREFLNQHPSVTLVIYIARLFQHTDPQNRQGLRDLIHSGVTLQIMGPPEYDYCWRNFVNYPPGKEAHWPRYPPLWMKLYALELHCIILGLPPCLKISRRCQNQLTWFRLILQNCHYQMIPPHILLGTGLIQLPVAWR

SEQ ID NO: 78 - protein, 248 aa, Pongo abelii
MTPEEEVQRQSTMTSEKGPSTGDPTLRRRIESWEFDVFYDPRELRKETCLLYEIKWGMSRKIWRSSGKNTTNHVEVNFIKKFTSERRFHSSISCSITWFLSWSPCWECSQAIREFLSQHPGVTLVIYVARLFWHMDQRNRQGLRDLVNSGVTIQIMRASEYYHCWRNFVNYPPGDEAHWPQYPPLWMMLYALELHCIILSLPPCLKISRRWQNHLAFFRLHLQNCHYQTIPPHILLATGLIHPSVTWK

SEQ ID NO: 79 - protein, 142 aa, Eurypyga helias
RWKIQPNDFKRNYMPSQYPKVVYLLYEIRWSRGTVWRNWCSNSFTQHAEVNFLENYFKPMPSVSCSITWVLSTTPCGKCSRRILEFLRVHPNVTLEIYAAKLFKHLDIRNRQGLRDLAMNGVTIRIMNLADYSFCWKRFVAY

SEQ ID NO: 80 - protein, 228 aa, Sarcophilus harrisii
MGDATLRRRIKSWEFEAFFNPQELRKETCLLYEIKWGASHNIWRSSNQNTTQHAEINFMEKFTSERNFKPSVKCSITWFLSWSPCWRCSKAIREFLNQYPNVTLVIFVSRLYWHMEQQHRQELKELVCSGVTIQIMNYSEYRHCWRNFVDYLPEEEDHWPKYPTLWIMLYVLELHCIILGLPPCLKISVRHSDQLVLFSLDLQDCHYQKIPYHVLVATGIIRPFVTWR

SEQ ID NO: 81 - protein, 338 aa, Leptonychotes weddellii
MASDKGPSAGDATLRRRIKPWEFEVFFDPRELRKETCLLYEIQWGTSHKIWRNSGKNTANHVEINFIEKFTSERQYCPSIRCSITWFLSWSPCWECSKAIRGFLSQHPSVTLVIYVARLFWHMDPQNRQGLRDLINSGVTIQIMRVPEYDHCWRNFVNYLPGKEDHWPRYPVLWMKLYALELHCIILPIEMPGKIRDAPNNMEIFSLFVGRYIPKTKFHVTCLLSDVRNDDSHLDKTAPKWIRFDSLQPVASDPSAEHWKMKLPGRDDKTAVVVGTVTEDVACAQGAKLYLCALRVHGHAQRHFLKGRDEILALDQLALDSPQGLWRQPDLRSHPLKG

SEQ ID NO: 82 - protein, 216 aa, Erinaceus europaeus
RRIEPWEFEDFFDPRQFRPETCLLYEVRWGSSRNAWRSTARNTTRHAEVNFLERFAAERHFDKPVSCSITWFLSWSPCWECSQAIGAFLSQHPQVTLAIHVTRLFHHEDEQNRQGLRDLLARGVTLQVMGDSEYAHCWRTFVNSPPGAEGHYPRYPSDFTRLYALELHCIILGLPPCLEILRRYQNQFTLFRLVPQNCHYQMIPHLNFFVVRHYFF

SEQ ID NO: 83 - protein, 142 aa, Haliaeetus albicilla
RWKLQPNDFKRNYLPGQHPKVVYLLYEIRWSRGTIWRNWCSNNSTQHAEVNFLENCFKATPSVSCSITWVLSTTPCGKCSRRILEFLRVHPNVTLEIYAAKLFKHLDIRNRKGLRDLAMNGVIIRIMNLSDYSYCWKTFVAY

SEQ ID NO: 84 - protein, 221 aa, Callithrix jacchus
RRIEPWEFYISYDPKELCKETCLLYEIKWGMSWKIWRSSGKNTTNHVEINFIEKFTSERHFHLSVSCSITWFLSWSPCWECSQAIREFLSQHPGVTLVIYVARLFQHMDQQNRQGLRDLVNSGVTIQMMTVSEYYHCWRNFVNYPPGEEAHWPRHPPLWLMLYALELHCIILGLPPCLKISRRRQNRLTFFRLHLQNCHYQMIPRHILLATGLIQPSVTWR

SEQ ID NO: 85 - protein, 238 aa, Bos mutus
MIISWSTGPPAGDPTLRRRIEPWEFEFSFDPRKFCKEACLLYEIQWGNNRDVWRHSGKNTTKHVERNFIEKIASERYFCPSIRCFIFWYLSWSPCWECSKAIREFLNQHPNVTLVIYIARLFQHMDPQNRQGLKDLVQSGVTIQVMRAPEYEYCWRNFVNYPRGKEAHWPRYPPLWMNLYALELYCIILGLPPCLHISRRYQNQLIVFRLTLQNCHYQMIPPYILLATGMVQIPMTWR

SEQ ID NO: 86 - protein, 130 aa, Pterocles gutturalis
RWKIQPNYFKINNLPGQHPRVVCLLYAIRWSRSTLWKSWCSNNSTQHAEVNFLENCFKGNPSVFCFMTWPFFHTTPHGKCCRRTPEFLGVHPNVTLKIRAAKLFKHLDRYNQQGLRNVAMNGVVIRIINL

SEQ ID NO: 87 - protein, 198 aa, Homo sapiens [sequence omitted]

SEQ ID NO: 88 - protein, 224 aa, Homo sapiens
MAQKEEAAVATEAASQNGEDLENLDDPEKLKELIELPPFEIVTGERLPANFFKFQFRNVEYSSGRNKTFLCYVVEAQGKGGQVQASRGYLEDEHAAAHAEEAFFNTILPAFDPALRYNVTWYVSSSPCAACADRIIKTLSKTKNLRLLILVGRLFMWEEPEIQAALKKLKEAGCKLRIMKPQDFEYVWQNFVEQEEGESKAFQPWEDIQENFLYYEEKLADILK

SEQ ID NO: 89 - protein, 199 aa, Homo sapiens
MEASPASGPRHLMDPHIFTSNFNNGIGRHKTYLCYEVERLDNGTSVKMDQHRGFLHNQAKNLLCGFYGRHAELRFLDLVPSLQLDPAQIYRVTWFISWSPCFSWGCAGEVRAFLQENTHVRLRIFAARIYDYDPLYKEALQMLRDAGAQVSIMTYDEFKHCWDTFVDHQGCPFQPWDGLDEHSQALSGRLRAILQNQGN

SEQ ID NO: 90 - protein, 382 aa, Homo sapiens
MNPQIRNPMERMYRDTFYDNFENEPILYGRSYTWLCYEVKIKRGRSNLLWDTGVFRGQVYFKPQYHAEMCFLSWFCGNQLPAYKCFQITWFVSWTPCPDCVAKLAEFLSEHPNVTLTISAARLYYYWERDYRRALCRLSQAGARVTIMDYEEFAYCWENFVYNEGQQFMPWYKFDENYAFLHRTLKEILRYLMDPDTFTFNFNNDPLVLRRRQTYLCYEVERLDNGTWVLMDQHMGFLCNEAKNLLCGFYGRHAELRFLDLVPSLQLDPAQIYRVTWFISWSPCFSWGCAGEVRAFLQENTHVRLRIFAARIYDYDPLYKEALQMLRDAGAQVSIMTYDEFEYCWDTFVYRQGCPFQPWDGLEEHSQALSGRLRAILQNQGN

SEQ ID NO: 91 - protein, 190 aa, Homo sapiens
MNPQIRNPMKAMYPGTFYFQFKNLWEANDRNETWLCFTVEGIKRRSVVSWKTGVFRNQVDSETHCHAERCFLSWFCDDILSPNTKYQVTWYTSWSPCPDCAGEVAEFLARHSNVNLTIFTARLYYFQYPCYQEGLRSLSQEGVAVEIMDYEDFKYCWENFVYNDNEPFKPWKGLKTNFRLLKRRLRESLQ

SEQ ID NO: 92 - protein, 386 aa, Homo sapiens
MNPQIRNPMERMYRDTFYDNFENEPILYGRSYTWLCYEVKIKRGRSNLLWDTGVFRGPVLPKRQSNHRQEVYFRFENHAEMCFLSWFCGNRLPANRRFQITWFVSWNPCLPCVVKVTKFLAEHPNVTLTISAARLYYYRDRDWRWVLLRLHKAGARVKIMDYEDFAYCWENFVCNEGQPFMPWYKFDDNYASLHRTLKEILRNPMEAMYPHIFYFHFKNLLKACGRNESWLCFTMEVTKHHSAVFRKRGVFRNQVDPETHCHAERCFLSWFCDDILSPNTNYEVTWYTSWSPCPECAGEVAEFLARHSNVNLTIFTARLCYFWDTDYQEGLCSLSQEGASVKIMGYKDFVSCWKNFVYSDDEPFKPWKGLQTNFRLLKRRLREILQ

SEQ ID NO: 93 - protein, 373 aa, Homo sapiens
MKPHFRNTVERMYRDTFSYNFYNRPILSRRNTVWLCYEVKTKGPSRPRLDAKIFRGQVYSQPEHHAEMCFLSWFCGNQLPAYKCFQITWFVSWTPCPDCVAKLAEFLAEHPNVTLTISAARLYYYWERDYRRALCRLSQAGARVKIMDDEEFAYCWENFVYSEGQPFMPWYKFDDNYAFLHRTLKEILRNPMEAMYPHIFYFHFKNLRKAYGRNESWLCFTMEVVKHHSPVSWKRGVFRNQVDPETHCHAERCFLSWFCDDILSPNTNYEVTWYTSWSPCPECAGEVAEFLARHSNVNLTIFTARLYYFWDTDYQEGLRSLSQEGASVEIMGYKDFKYCWENFVYNDDEPFKPWKGLKYNFLFLDSKLQEILE

SEQ ID NO: 94 - protein, 384 aa, Homo sapiens
MKPHFRNTVERMYRDTFSYNFYNRPILSRRNTVWLCYEVKTKGPSRPPLDAKIFRGQVYSELKYHPEMRFFHWFSKWRKLHRDQEYEVTWYISWSPCTKCTRDMATFLAEDPKVTLTIFVARLYYFWDPDYQEALRSLCQKRDGPRATMKIMNYDEFQHCWSKFVYSQRELFEPWNNLPKYYILLHIMLGEILRHSMDPPTFTFNFNNEPWVRGRHETYLCYEVERMHNDTWVLLNQRRGFLCNQAPHKHGFLEGRHAELCFLDVIPFWKLDLDQDYRVTCFTSWSPCFSCAQEMAKFISKNKHVSLCIFTARIYDDQGRCQEGLRTLAEAGAKISIMTYSEFKHCWDTFVDHQGCPFQPWDGLDEHSQDLSGRLRAILQNQEN

SEQ ID NO: 95 - protein, 200 aa, Homo sapiens
MALLTAETFRLQFNNKRRLRRPYYPRKALLCYQLTPQNGSTPTRGYFENKKKCHAEICFINEIKSMGLDETQCYQVTCYLTWSPCSSCAWELVDFIKAHDHLNLGIFASRLYYHWCKPQQKGLRLLCGSQVPVEVMGFPEFADCWENFVDHEKPLSFNPYKMLEELDKNSRAIKRRLERIKIPGVRAQGRYMDILCDAEV

SEQ ID NO: 96 - protein, 208 aa, Petromyzon marinus
MTDAEYVRIHEKLDIYTFKKQFFNNKKSVSHRCYVLFELKRRGERRACFWGYAVNKPQSGTERGIHAEIFSIRKVEEYLRDNPGQFTINWYSSWSPCADCAEKILEWYNQELRGNGHTLKIWACKLYYEKNARNQIGLWNLRDNGVGLNVMVSEHYQCCRKIFIQSSHNQLNENRWLEKTLKRAEKRRSELSIMIQVKILHTTKSPAV

SEQ ID NO: 97 - protein, 208 aa, Petromyzon marinus
MTDAEYVRIHEKLDIYTFKKQFFNNKKSVSHRCYVLFELKRRGERRACFWGYAVNKPQSGTERGIHAEIFSIRKVEEYLRDNPGQFTINWYSSWSPCADCAEKILEWYNQELRGNGHTLKIWACKLYYEKNARNQIGLWNLRDNGVGLNVMVSEHYQCCRKIFIQSSHNQLNENRWLEKTLKRAEKWRSELSIMIQVKILHTTKSPAV

SEQ ID NO: 98 - protein, 167 aa, Escherichia coli
MSEVEFSHEYWMRHALTLAKRAWDEREVPVGAVLVHNNRVIGEGWNRPIGRHDPTAHAEIMALRQGGLVMQNYRLIDATLYVTLEPCVMCAGAMIHSRIGRVVFGARDAKTGAAGSLMDVLHHPGMNHRVEITEGILADECAALLSDFFRMRRQEIKAQKKAQSSTD

SEQ ID NO: 99 - protein, 156 aa, Staphylococcus aureus
MTNDIYFMTLAIEEAKKAAQLGEVPIGAIITKDDEVIARAHNLRETLQQPTAHAEHIAIERAAKVLGSWRLEGCTLYVTLEPCVMCAGTIVMSRIPRVVYGADDPKGGCSGSLMNLLQQSNFNHRAIVDKGVLKEACSTLLTTFFKNLRANKKSTN

SEQ ID NO: 100 - protein, 171 aa, Streptococcus pyogenes
MPYSLEEQTYFMQEALKEAEKSLQKAEIPIGCVIVKDGEIIGRGHNAREESNQAIMHAEMMAINEANAHEGNWRLLDTTLFVTIEPCVMCSGAIGLARIPHVIYGASNQKFGGADSLYQILTDERLNHRVQVERGLLAADCANIMQTFFRQGRERKKIAKHLIKEQSDPFD

SEQ ID NO: 101 - protein, 172 aa, Salmonella typhi
MSDVELDHEYWMRHALTLAKRAWDEREVPVGAVLVHNHRVIGEGWNRPIGRHDPTAHAEIMALRQGGLVLQNYRLLDTTLYVTLEPCVMCAGAMVHSRIGRVVFGARDAKTGAAGSLIDVLHHPGMNHRVEIIEGVLRDECATLLSDFFRMRRQEIKALKKADRAEGAGPAV

SEQ ID NO: 102 - protein, 151 aa, Aquifex aeolicus
MGKEYFLKVALREAKRAFEKGEVPVGAIIVKEGEIISKAHNSVEELKDPTAHAEMLAIKEACRRLNTKYLEGCELYVTLEPCIMCSYALVLSRIEKVIFSALDKKHGGVVSVFNILDEPTLNHRVKWEYYPLEEASELLSEFFKKLRNNII

SEQ ID NO: 103 - protein, 389 aa, Schizosaccharomyces pombe
MAGDSVKSAIIGIAGGPFSGKTQLCEQLLERLKSSAPSTFSKLIHLTSFLYPNSVDRYALSSYDIEAFKKVLSLISQGAEKICLPDGSCIKLPVDQNRIILIEGYYLLLPELLPYYTSKIFVYEDADTRLERCVLQRVKAEKGDLTKVLNDFVTLSKPAYDSSIHPTRENADIILPQKENIDTALLFVSQHLQDILAEMNKTSSSNTVKYDTQHETYMKLAHEILNLGPYFVIQPRSPGSCVFVYKGEVIGRGFNETNCSLSGIRHAELIAIEKILEHYPASVFKETTLYVTVEPCLMCAAALKQLHIKAVYFGCGNDRFGGCGSVFSINKDQSIDPSYPVYPGLFYSEAVMLMREFYVQENVKAPVPQSKKQRVLKREVKSLDLSRFK

SEQ ID NO: 104 - protein, 400 aa, Saccharomyces cerevisiae
MVSCQGTRPCIVNLLTMPSEDKLGEEISTRVINEYSKLKSACRPIIRPSGIREWTILAGVAAINRDGGANKIEILSIATGVKALPDSELQRSEGKILHDCHAEILALRGANTVLLNRIQNYNPSSGDKFIQHNDEIPARFNLKENWELALYISRLPCGDASMSFLNDNCKNDDFIKIEDSDEFQYVDRSVKTILRGRLNFNRRNVVRTKPGRYDSNITLSKSCSDKLLMKQRSSVLNCLNYELFEKPVFLKYIVIPNLEDETKHHLEQSFHTRLPNLDNEIKFLNCLKPFYDDKLDEEDVPGLMCSVKLFMDDFSTEEAILNGVRNGFYTKSSKPLRKHCQSQVSRFAQWELFKKIRPEYEGISYLEFKSRQKKRSQLIIAIKNILSPDGWIPTRTDDVK

SEQ ID NO: 105 - protein, 250 aa, Saccharomyces cerevisiae
MQHIKHMRTAVRLARYALDHDETPVACIFVHTPTGQVMAYGMNDTNKSLTGVAHAEFMGIDQIKAMLGSRGVVDVFKDITLYVTVEPCIMCASALKQLDIGKVVFGCGNERFGGNGTVLSVNHDTCTLVPKNNSAAGYESIPGILRKEAIMLLRYFYVRQNERAPKPRSKSDRVLDKNTFPPMEWSKYLNEEAFIETFGDDYRTCFANKVDLSSNSVDWDLIDSHQDNIIQELEEQCKMFKFNVHKKSKV

SEQ ID NO: 106 - protein, 182 aa, Arabidopsis thaliana
MEEDHCEDSHNYMGFALHQAKLALEALEVPVGCVFLEDGKVIASGRNRTNETRNATRHAEMEAIDQLVGQWQKDGLSPSQVAEKFSKCVLYVTCEPCIMCASALSFLGIKEVYYGCPNDKFGGCGSILSLHLGSEEAQRGKGYKCRGGIMAEEAVSLFKCFYEQGNPNAPKPHRPVVQRERT

SEQ ID NO: 107 - protein, 175 aa, Xenopus laevis
MEPLQITEEIQNWMHKAFQMAQDALNNGEVPVGCLMVYGNQVVGKGRNEVNETKNATQHAEMVAIDQVLDWCEMNSKKSTDVFENIVLYVTVEPCIMCAGALRLLKIPLVVYGCRNERFGGCGSVLNVSGDDIPDTGTKFKCIGGYQAEKAIELLKTFYKQENPNAPKSKVRKKE

SEQ ID NO: 108 - protein, 170 aa, Xenopus tropicalis
MTEEIQNWMHKAFQMAQDALNNGEVPVGCLMVYDNQVVGKGRNEVNETKNATRHAEMVAIDQVLDWCEKNSKKSRDVFENIVLYVTVEPCIMCAGALRLLKIPLVVYGCRNERFGGCGSVLNVAGDNIPDTGTEFKYIGGYQAEKAVELLKTFYKQENPNAPRSKVRKKE

SEQ ID NO: 109 - protein, 214 aa, Danio rerio
MQEVGVDPEKNDFLQPSDSEVQTWMAKAFDMAVEALENGEVPVGCLMVYNNEIIGKGRNEVNETKNATRHAEMVALDQVLDWCRLREKDCKEVCEQTVLYVTVEPCIMCAAALRLLRIPFVVYGCKNERFGGCGSVLDVSSDHLPHTGTSFKCIAGYRAEEAVEMLKTFYKQENPNAPKPKVRKDSINPQDGAAVIQVMRGPPDEETETIAHLS

SEQ ID NO: 110 - protein, 191 aa, Bos taurus
MEAKAGPTAATDGAYSVSAEETEKWMEQAMQMAKDALDNTEVPVGCLMVYNNEVVGKGRNEVNQTKNATRHAEMVAIDQALDWCRRRGRSPSEVFEHTVLYVTVEPCIMCAAALRLMRIPLVVYGCQNERFGGCGSVLDIASADLPSTGKPFQCTPGYRAEEAVEMLKTFYKQENPNAPKSKVRKKECHKS

SEQ ID NO: 111 - protein, 191 aa, Mus musculus
MEEKVESTTTPDGPCVVSVQETEKWMEEAMRMAKEALENIEVPVGCLMVYNNEVVGKGRNEVNQTKNATRHAEMVAIDQVLDWCHQHGQSPSTVFEHTVLYVTVEPCIMCAAALRLMKIPLVVYGCQNERFGGCGSVLNIASADLPNTGRPFQCIPGYRAEEAVELLKTFYKQENPNAPKSKVRKKDCQKS

SEQ ID NO: 112 - protein, 191 aa, Homo sapiens
MEAKAAPKPAASGACSVSAEETEKWMEEAMHMAKEALENTEVPVGCLMVYNNEVVGKGRNEVNQTKNATRHAEMVAIDQVLDWCRQSGKSPSEVFEHTVLYVTVEPCIMCAAALRLMKIPLVVYGCQNERFGGCGSVLNIASADLPNTGRPFQCIPGYRAEEAVEMLKTFYKQENPNAPKSKVRKKECQKS

SEQ ID NO: 113 - protein, 1623 aa, Artificial Sequence
  Description of Artificial Sequence: Synthetic polypeptide
MSSETGPVAVDPTLRRRIEPHEFEVFFDPRELRKETCLLYEINWGGRHSIWRHTSQNTNKHVEVNFIEKFTTERYFCPNTRCSITWFLSWSPCGECSRAITEFLSRYPHVTLFIYIARLYHHADPRNRQGLRDLISSGVTIQIMTEQESGYCWRNFVNYSPSNEAHWPRYPHLWVRLYVLELYCIILGLPPCLNILRRKQPQLTFFTIALQSCHYQRLPPHILWATGLKSGSETPGTSESATPESDKKYSIGLAIGTNSVGWAVITDEYKVPSKKFKVLGNTDRHSIKKNLIGALLFDSGETAEATRLKRTARRRYTRRKNRICYLQEIFSNEMAKVDDSFFHRLEESFLVEEDKKHERHPIFGNIVDEVAYHEKYPTIYHLRKKLVDSTDKADLRLIYLALAHMIKFRGHFLIEGDLNPDNSDVDKLFIQLVQTYNQLFEENPINASGVDAKAILSARLSKSRRLENLIAQLPGEKKNGLFGNLIALSLGLTPNFKSNFDLAEDAKLQLSKDTYDDDLDNLLAQIGDQYADLFLAAKNLSDAILLSDILRVNTEITKAPLSASMIKRYDEHHQDLTLLKALVRQQLPEKYKEIFFDQSKNGYAGYIDGGASQEEFYKFIKPILEKMDGTEELLVKLNREDLLRKQRTFDNGSIPHQIHLGELHAILRRQEDFYPFLKDNREKIEKILTFRIPYYVGPLARGNSRFAWMTRKSEETITPWNFEEVVDKGASAQSFIERMTNFDKNLPNEKVLPKHSLLYEYFTVYNELTKVKYVTEGMRKPAFLSGEQKKAIVDLLFKTNRKVTVKQLKEDYFKKIECFDSVEISGVEDRFNASLGTYHDLLKIIKDKDFLDNEENEDILEDIVLTLTLFEDREMIEERLKTYAHLFDDKVMKQLKRRRYTGWGRLSRKLINGIRDKQSGKTILDFLKSDGFANRNFMQLIHDDSLTFKEDIQKAQVSGQGDSLHEHIANLAGSPAIKKGILQTVKVVDELVKVMGRHKPENIVIEMARENQTTQKGQKNSRERMKRIEEGIKELGSQILKEHPVENTQLQNEKLYLYYLQNGRDMYVDQELDINRLSDYDVDAIVPQSFLKDDSIDNKVLTRSDKNRGKSDNVPSEEVVKKMKNYWRQLLNAKLITQRKFDNLTKAERGGLSELDKAGFIKRQLVETRQITKHVAQILDSRMNTKYDENDKLIREVKVITLKSKLVSDFRKDFQFYKVREINNYHHAHDAYLNAVVGTALIKKYPKLESEFVYGDYKVYDVRKMIAKSEQEIGKATAKYFFYSNIMNFFKTEITLANGEIRKRPLIETNGETGEIVWDKGRDFATVRKVLSMPQVNIVKKTEVQTGGFSKESILPKRNSDKLIARKKDWDPKKYGGFDSPTVAYSVLVVAKVEKGKSKKLKSVKELLGITIMERSSFEKNPIDFLEAKGYKEVKKDLIIKLPKYSLFELENGRKRMLASAGELQKGNELALPSKYVNFLYLASHYEKLKGSPEDNEQKQLFVEQHKHYLDEIIEQISEFSKRVILADANLDKVLSAYNKHRDKPIREQAENIIHLFTLTNLGAPAAFKYFDTTIDRKRYTSTKEVLDATLIHQSITGLYETRIDLSQLGGDSGGSPKKKRKV

SEQ ID NO: 114 - protein, 1710 aa, Artificial Sequence
  Description of Artificial Sequence: Synthetic polypeptide
MSSETGPVAVDPTLRRRIEPHEFEVFFDPRELRKETCLLYEINWGGRHSIWRHTSQNTNKHVEVNFIEKFTTERYFCPNTRCSITWFLSWSPCGECSRAITEFLSRYPHVTLFIYIARLYHHADPRNRQGLRDLISSGVTIQIMTEQESGYCWRNFVNYSPSNEAHWPRYPHLWVRLYVLELYCIILGLPPCLNILRRKQPQLTFFTIALQSCHYQRLPPHILWATGLKSGSETPGTSESATPESDKKYSIGLAIGTNSVGWAVITDEYKVPSKKFKVLGNTDRHSIKKNLIGALLFDSGETAEATRLKRTARRRYTRRKNRICYLQEIFSNEMAKVDDSFFHRLEESFLVEEDKKHERHPIFGNIVDEVAYHEKYPTIYHLRKKLVDSTDKADLRLIYLALAHMIKFRGHFLIEGDLNPDNSDVDKLFIQLVQTYNQLFEENPINASGVDAKAILSARLSKSRRLENLIAQLPGEKKNGLFGNLIALSLGLTPNFKSNFDLAEDAKLQLSKDTYDDDLDNLLAQIGDQYADLFLAAKNLSDAILLSDILRVNTEITKAPLSASMIKRYDEHHQDLTLLKALVRQQLPEKYKEIFFDQSKNGYAGYIDGGASQEEFYKFIKPILEKMDGTEELLVKLNREDLLRKQRTFDNGSIPHQIHLGELHAILRRQEDFYPFLKDNREKIEKILTFRIPYYVGPLARGNSRFAWMTRKSEETITPWNFEEVVDKGASAQSFIERMTNFDKNLPNEKVLPKHSLLYEYFTVYNELTKVKYVTEGMRKPAFLSGEQKKAIVDLLFKTNRKVTVKQLKEDYFKKIECFDSVEISGVEDRFNASLGTYHDLLKIIKDKDFLDNEENEDILEDIVLTLTLFEDREMIEERLKTYAHLFDDKVMKQLKRRRYTGWGRLSRKLINGIRDKQSGKTILDFLKSDGFANRNFMQLIHDDSLTFKEDIQKAQVSGQGDSLHEHIANLAGSPAIKKGILQTVKVVDELVKVMGRHKPENIVIEMARENQTTQKGQKNSRERMKRIEEGIKELGSQILKEHPVENTQLQNEKLYLYYLQNGRDMYVDQELDINRLSDYDVDAIVPQSFLKDDSIDNKVLTRSDKNRGKSDNVPSEEVVKKMKNYWRQLLNAKLITQRKFDNLTKAERGGLSELDKAGFIKRQLVETRQITKHVAQILDSRMNTKYDENDKLIREVKVITLKSKLVSDFRKDFQFYKVREINNYHHAHDAYLNAVVGTALIKKYPKLESEFVYGDYKVYDVRKMIAKSEQEIGKATAKYFFYSNIMNFFKTEITLANGEIRKRPLIETNGETGEIVWDKGRDFATVRKVLSMPQVNIVKKTEVQTGGFSKESILPKRNSDKLIARKKDWDPKKYGGFDSPTVAYSVLVVAKVEKGKSKKLKSVKELLGITIMERSSFEKNPIDFLEAKGYKEVKKDLIIKLPKYSLFELENGRKRMLASAGELQKGNELALPSKYVNFLYLASHYEKLKGSPEDNEQKQLFVEQHKHYLDEIIEQISEFSKRVILADANLDKVLSAYNKHRDKPIREQAENIIHLFTLTNLGAPAAFKYFDTTIDRKRYTSTKEVLDATLIHQSITGLYETRIDLSQLGGDSGGSTNLSDIIEKETGKQLVIQESILMLPEEVEEVIGNKPESDILVHTAYDESTDENVMLLTSDAPEYKPWALVIQDSNGENKIKMLSGGSPKKKRKV

SEQ ID NO: 115 - protein, 1710 aa, Artificial Sequence
  Description of Artificial Sequence: Synthetic polypeptide
MSSETGPVAVDPTLRRRIEPHEFEVFFDPRELRKETCLLYEINWGGRHSIWRHTSQNTNKHVEVNFIEKFTTERYFCPNTRCSITWFLSWSPCGECSRAITEFLSRYPHVTLFIYIARLYHHADPRNRQGLRDLISSGVTIQIMTEQESGYCWRNFVNYSPSNEAHWPRYPHLWVRLYVLELYCIILGLPPCLNILRRKQPQLTFFTIALQSCHYQRLPPHILWATGLKSGSETPGTSESATPESDKKYSIGLAIGTNSVGWAVITDEYKVPSKKFKVLGNTDRHSIKKNLIGALLFDSGETAEATRLKRTARRRYTRRKNRICYLQEIFSNEMAKVDDSFFHRLEESFLVEEDKKHERHPIFGNIVDEVAYHEKYPTIYHLRKKLVDSTDKADLRLIYLALAHMIKFRGHFLIEGDLNPDNSDVDKLFIQLVQTYNQLFEENPINASGVDAKAILSARLSKSRRLENLIAQLPGEKKNGLFGNLIALSLGLTPNFKSNFDLAEDAKLQLSKDTYDDDLDNLLAQIGDQYADLFLAAKNLSDAILLSDILRVNTEITKAPLSASMIKRYDEHHQDLTLLKALVRQQLPEKYKEIFFDQSKNGYAGYIDGGASQEEFYKFIKPILEKMDGTEELLVKLNREDLLRKQRTFDNGSIPHQIHLGELHAILRRQEDFYPFLKDNREKIEKILTFRIPYYVGPLARGNSRFAWMTRKSEETITPWNFEEVVDKGASAQSFIERMTNFDKNLPNEKVLPKHSLLYEYFTVYNELTKVKYVTEGMRKPAFLSGEQKKAIVDLLFKTNRKVTVKQLKEDYFKKIECFDSVEISGVEDRFNASLGTYHDLLKIIKDKDFLDNEENEDILEDIVLTLTLFEDREMIEERLKTYAHLFDDKVMKQLKRRRYTGWGRLSRKLINGIRDKQSGKTILDFLKSDGFANRNFMQLIHDDSLTFKEDIQKAQVSGQGDSLHEHIANLAGSPAIKKGILQTVKVVDELVKVMGRHKPENIVIEMARENQTTQKGQKNSRERMKRIEEGIKELGSQILKEHPVENTQLQNEKLYLYYLQNGRDMYVDQELDINRLSDYDVDHIVPQSFLKDDSIDNKVLTRSDKNRGKSDNVPSEEVVKKMKNYWRQLLNAKLITQRKFDNLTKAERGGLSELDKAGFIKRQLVETRQITKHVAQILDSRMNTKYDENDKLIREVKVITLKSKLVSDFRKDFQFYKVREINNYHHAHDAYLNAVVGTALIKKYPKLESEFVYGDYKVYDVRKMIAKSEQEIGKATAKYFFYSNIMNFFKTEITLANGEIRKRPLIETNGETGEIVWDKGRDFATVRKVLSMPQVNIVKKTEVQTGGFSKESILPKRNSDKLIARKKDWDPKKYGGFDSPTVAYSVLVVAKVEKGKSKKLKSVKELLGITIMERSSFEKNPIDFLEAKGYKEVKKDLIIKLPKYSLFELENGRKRMLASAGELQKGNELALPSKYVNFLYLASHYEKLKGSPEDNEQKQLFVEQHKHYLDEIIEQISEFSKRVILADANLDKVLSAYNKHRDKPIREQAENIIHLFTLTNLGAPAAFKYFDTTIDRKRYTSTKEVLDATLIHQSITGLYETRIDLSQLGGDSGGSTNLSDIIEKETGKQLVIQESILMLPEEVEEVIGNKPESDILVHTAYDESTDENVMLLTSDAPEYKPWALVIQDSNGENKIKMLSGGSPKKKRKV

SEQ ID NO: 116 - protein, 1689 aa, Artificial Sequence
  Description of Artificial Sequence: Synthetic polypeptide
MTDAEYVRIHEKLDIYTFKKQFFNNKKSVSHRCYVLFELKRRGERRACFWGYAVNKPQSGTERGIHAEIFSIRKVEEYLRDNPGQFTINWYSSWSPCADCAEKILEWYNQELRGNGHTLKIWACKLYYEKNARNQIGLWNLRDNGVGLNVMVSEHYQCCRKIFIQSSHNQLNENRWLEKTLKRAEKRRSELSIMIQVKILHTTKSPAVSGSETPGTSESATPESDKKYSIGLAIGTNSVGWAVITDEYKVPSKKFKVLGNTDRHSIKKNLIGALLFDSGETAEATRLKRTARRRYTRRKNRICYLQEIFSNEMAKVDDSFFHRLEESFLVEEDKKHERHPIFGNIVDEVAYHEKYPTIYHLRKKLVDSTDKADLRLIYLALAHMIKFRGHFLIEGDLNPDNSDVDKLFIQLVQTYNQLFEENPINASGVDAKAILSARLSKSRRLENLIAQLPGEKKNGLFGNLIALSLGLTPNFKSNFDLAEDAKLQLSKDTYDDDLDNLLAQIGDQYADLFLAAKNLSDAILLSDILRVNTEITKAPLSASMIKRYDEHHQDLTLLKALVRQQLPEKYKEIFFDQSKNGYAGYIDGGASQEEFYKFIKPILEKMDGTEELLVKLNREDLLRKQRTFDNGSIPHQIHLGELHAILRRQEDFYPFLKDNREKIEKILTFRIPYYVGPLARGNSRFAWMTRKSEETITPWNFEEVVDKGASAQSFIERMTNFDKNLPNEKVLPKHSLLYEYFTVYNELTKVKYVTEGMRKPAFLSGEQKKAIVDLLFKTNRKVTVKQLKEDYFKKIECFDSVEISGVEDRFNASLGTYHDLLKIIKDKDFLDNEENEDILEDIVLTLTLFEDREMIEERLKTYAHLFDDKVMKQLKRRRYTGWGRLSRKLINGIRDKQSGKTILDFLKSDGFANRNFMQLIHDDSLTFKEDIQKAQVSGQGDSLHEHIANLAGSPAIKKGILQTVKVVDELVKVMGRHKPENIVIEMARENQTTQKGQKNSRERMKRIEEGIKELGSQILKEHPVENTQLQNEKLYLYYLQNGRDMYVDQELDINRLSDYDVDHIVPQSFLKDDSIDNKVLTRSDKNRGKSDNVPSEEVVKKMKNYWRQLLNAKLITQRKFDNLTKAERGGLSELDKAGFIKRQLVETRQITKHVAQILDSRMNTKYDENDKLIREVKVITLKSKLVSDFRKDFQFYKVREINNYHHAHDAYLNAVVGTALIKKYPKLESEFVYGDYKVYDVRKMIAKSEQEIGKATAKYFFYSNIMNFFKTEITLANGEIRKRPLIETNGETGEIVWDKGRDFATVRKVLSMPQVNIVKKTEVQTGGFSKESILPKRNSDKLIARKKDWDPKKYGGFDSPTVAYSVLVVAKVEKGKSKKLKSVKELLGITIMERSSFEKNPIDFLEAKGYKEVKKDLIIKLPKYSLFELENGRKRMLASAGELQKGNELALPSKYVNFLYLASHYEKLKGSPEDNEQKQLFVEQHKHYLDEIIEQISEFSKRVILADANLDKVLSAYNKHRDKPIREQAENIIHLFTLTNLGAPAAFKYFDTTIDRKRYTSTKEVLDATLIHQSITGLYETRIDLSQLGGDSGGSTNLSDIIEKETGKQLVIQESILMLPEEVEEVIGNKPESDILVHTAYDESTDENVMLLTSDAPEYKPWALVIQDSNGENKIKMLSGGSPKKKRKV

SEQ ID NO: 117 - protein, 1679 aa, Artificial Sequence
  Description of Artificial Sequence: Synthetic polypeptide
MDSLLMNRRKFLYQFKNVRWAKGRRETYLCYVVKRRDSATSFSLDFGYLRNKNGCHVELLFLRYISDWDLDPGRCYRVTWFTSWSPCYDCARHVADFLRGNPNLSLRIFTARLYFCEDRKAEPEGLRRLHRAGVQIAIMTFKDYFYCWNTFVENHERTFKAWEGLHENSVRLSRQLRRILLPLYEVDDLRDAFRTLGLSGSETPGTSESATPESDKKYSIGLAIGTNSVGWAVITDEYKVPSKKFKVLGNTDRHSIKKNLIGALLFDSGETAEATRLKRTARRRYTRRKNRICYLQEIFSNEMAKVDDSFFHRLEESFLVEEDKKHERHPIFGNIVDEVAYHEKYPTIYHLRKKLVDSTDKADLRLIYLALAHMIKFRGHFLIEGDLNPDNSDVDKLFIQLVQTYNQLFEENPINASGVDAKAILSARLSKSRRLENLIAQLPGEKKNGLFGNLIALSLGLTPNFKSNFDLAEDAKLQLSKDTYDDDLDNLLAQIGDQYADLFLAAKNLSDAILLSDILRVNTEITKAPLSASMIKRYDEHHQDLTLLKALVRQQLPEKYKEIFFDQSKNGYAGYIDGGASQEEFYKFIKPILEKMDGTEELLVKLNREDLLRKQRTFDNGSIPHQIHLGELHAILRRQEDFYPFLKDNREKIEKILTFRIPYYVGPLARGNSRFAWMTRKSEETITPWNFEEVVDKGASAQSFIERMTNFDKNLPNEKVLPKHSLLYEYFTVYNELTKVKYVTEGMRKPAFLSGEQKKAIVDLLFKTNRKVTVKQLKEDYFKKIECFDSVEISGVEDRFNASLGTYHDLLKIIKDKDFLDNEENEDILEDIVLTLTLFEDREMIEERLKTYAHLFDDKVMKQLKRRRYTGWGRLSRKLINGIRDKQSGKTILDFLKSDGFANRNFMQLIHDDSLTFKEDIQKAQVSGQGDSLHEHIANLAGSPAIKKGILQTVKVVDELVKVMGRHKPENIVIEMARENQTTQKGQKNSRERMKRIEEGIKELGSQILKEHPVENTQLQNEKLYLYYLQNGRDMYVDQELDINRLSDYDVDHIVPQSFLKDDSIDNKVLTRSDKNRGKSDNVPSEEVVKKMKNYWRQLLNAKLITQRKFDNLTKAERGGLSELDKAGFIKRQLVETRQITKHVAQILDSRMNTKYDENDKLIREVKVITLKSKLVSDFRKDFQFYKVREINNYHHAHDAYLNAVVGTALIKKYPKLESEFVYGDYKVYDVRKMIAKSEQEIGKATAKYFFYSNIMNFFKTEITLANGEIRKRPLIETNGETGEIVWDKGRDFATVRKVLSMPQVNIVKKTEVQTGGFSKESILPKRNSDKLIARKKDWDPKKYGGFDSPTVAYSVLVVAKVEKGKSKKLKSVKELLGITIMERSSFEKNPIDFLEAKGYKEVKKDLIIKLPKYSLFELENGRKRMLASAGELQKGNELALPSKYVNFLYLASHYEKLKGSPEDNEQKQLFVEQHKHYLDEIIEQISEFSKRVILADANLDKVLSAYNKHRDKPIREQAENIIHLFTLTNLGAPAAFKYFDTTIDRKRYTSTKEVLDATLIHQSITGLYETRIDLSQLGGDSGGSTNLSDIIEKETGKQLVIQESILMLPEEVEEVIGNKPESDILVHTAYDESTDENVMLLTSDAPEYKPWALVIQDSNGENKIKMLSGGSPKKKRKV

SEQ ID NO: 118 - protein, 1899 aa, Artificial Sequence
  Description of Artificial Sequence: Synthetic polypeptide
MAKPAKRIKSAAAAYVPQNRDAVITDIKRIGDLQREASRLETEMNDAIAEITEKFAARIAPIKTDIETLSKGVQGWCEANRDELTNGGKVKTANLVTGDVSWRVRPPSVSIRGMDAVMETLERLGLQRFIRTKQEINKEAILLEPKAVAGVAGITVKSGIEDFSIIPFEQEAGISGSETPGTSESATPESSSETGPVAVDPTLRRRIEPHEFEVFFDPRELRKETCLLYEINWGGRHSIWRHTSQNTNKHVEVNFIEKFTTERYFCPNTRCSITWFLSWSPCGECSRAITEFLSRYPHVTLFIYIARLYHHADPRNRQGLRDLISSGVTIQIMTEQESGYCWRNFVNYSPSNEAHWPRYPHLWVRLYVLELYCIILGLPPCLNILRRKQPQLTFFTIALQSCHYQRLPPHILWATGLKSGSETPGTSESATPESDKKYSIGLAIGTNSVGWAVITDEYKVPSKKFKVLGNTDRHSIKKNLIGALLFDSGETAEATRLKRTARRRYTRRKNRICYLQEIFSNEMAKVDDSFFHRLEESFLVEEDKKHERHPIFGNIVDEVAYHEKYPTIYHLRKKLVDSTDKADLRLIYLALAHMIKFRGHFLIEGDLNPDNSDVDKLFIQLVQTYNQLFEENPINASGVDAKAILSARLSKSRRLENLIAQLPGEKKNGLFGNLIALSLGLTPNFKSNFDLAEDAKLQLSKDTYDDDLDNLLAQIGDQYADLFLAAKNLSDAILLSDILRVNTEITKAPLSASMIKRYDEHHQDLTLLKALVRQQLPEKYKEIFFDQSKNGYAGYIDGGASQEEFYKFIKPILEKMDGTEELLVKLNREDLLRKQRTFDNGSIPHQIHLGELHAILRRQEDFYPFLKDNREKIEKILTFRIPYYVGPLARGNSRFAWMTRKSEETITPWNFEEVVDKGASAQSFIERMTNFDKNLPNEKVLPKHSLLYEYFTVYNELTKVKYVTEGMRKPAFLSGEQKKAIVDLLFKTNRKVTVKQLKEDYFKKIECFDSVEISGVEDRFNASLGTYHDLLKIIKDKDFLDNEENEDILEDIVLTLTLFEDREMIEERLKTYAHLFDDKVMKQLKRRRYTGWGRLSRKLINGIRDKQSGKTILDFLKSDGFANRNFMQLIHDDSLTFKEDIQKAQVSGQGDSLHEHIANLAGSPAIKKGILQTVKVVDELVKVMGRHKPENIVIEMARENQTTQKGQKNSRERMKRIEEGIKELGSQILKEHPVENTQLQNEKLYLYYLQNGRDMYVDQELDINRLSDYDVDHIVPQSFLKDDSIDNKVLTRSDKNRGKSDNVPSEEVVKKMKNYWRQLLNAKLITQRKFDNLTKAERGGLSELDKAGFIKRQLVETRQITKHVAQILDSRMNTKYDENDKLIREVKVITLKSKLVSDFRKDFQFYKVREINNYHHAHDAYLNAVVGTALIKKYPKLESEFVYGDYKVYDVRKMIAKSEQEIGKATAKYFFYSNIMNFFKTEITLANGEIRKRPLIETNGETGEIVWDKGRDFATVRKVLSMPQVNIVKKTEVQTGGFSKESILPKRNSDKLIARKKDWDPKKYGGFDSPTVAYSVLVVAKVEKGKSKKLKSVKELLGITIMERSSFEKNPIDFLEAKGYKEVKKDLIIKLPKYSLFELENGRKRMLASAGELQKGNELALPSKYVNFLYLASHYEKLKGSPEDNEQKQLFVEQHKHYLDEIIEQISEFSKRVILADANLDKVLSAYNKHRDKPIREQAENIIHLFTLTNLGAPAAFKYFDTTIDRKRYTSTKEVLDATLIHQSITGLYETRIDLSQLGGDSGGSTNLSDIIEKETGKQLVIQESILMLPEEVEEVIGNKPESDILVHTAYDESTDENVMLLTSDAPEYKPWALVIQDSNGENKIKMLSGGSPKKKRKV

SEQ ID NO: 119 - protein, 1618 aa, Artificial Sequence
  Description of Artificial Sequence: Synthetic polypeptide
MAKPAKRIKSAAAAYVPQNRDAVITDIKRIGDLQREASRLETEMNDAIAEITEKFAARIAPIKTDIETLSKGVQGWCEANRDELTNGGKVKTANLVTGDVSWRVRPPSVSIRGMDAVMETLERLGLQRFIRTKQEINKEAILLEPKAVAGVAGITVKSGIEDFSIIPFEQEAGISGSETPGTSESATPESSSETGPVAVDPTLRRRIEPHEFEVFFDPRELRKETCLLYEINWGGRHSIWRHTSQNTNKHVEVNFIEKFTTERYFCPNTRCSITWFLSWSPCGECSRAITEFLSRYPHVTLFIYIARLYHHADPRNRQGLRDLISSGVTIQIMTEQESGYCWRNFVNYSPSNEAHWPRYPHLWVRLYVLELYCIILGLPPCLNILRRKQPQLTFFTIALQSCHYQRLPPHILWATGLKSGSETPGTSESATPESGKRNYILGLAIGITSVGYGIIDYETRDVIDAGVRLFKEANVENNEGRRSKRGARRLKRRRRHRIQRVKKLLFDYNLLTDHSELSGINPYEARVKGLSQKLSEEEFSAALLHLAKRRGVHNVNEVEEDTGNELSTKEQISRNSKALEEKYVAELQLERLKKDGEVRGSINRFKTSDYVKEAKQLLKVQKAYHQLDQSFIDTYIDLLETRRTYYEGPGEGSPFGWKDIKEWYEMLMGHCTYFPEELRSVKYAYNADLYNALNDLNNLVITRDENEKLEYYEKFQIIENVFKQKKKPTLKQIAKEILVNEEDIKGYRVTSTGKPEFTNLKVYHDIKDITARKEIIENAELLDQIAKILTIYQSSEDIQEELTNLNSELTQEEIEQISNLKGYTGTHNLSLKAINLILDELWHTNDNQIAIFNRLKLVPKKVDLSQQKEIPTTLVDDFILSPVVKRSFIQSIKVINAIIKKYGLPNDIIIELAREKNSKDAQKMINEMQKRNRQTNERIEEIIRTTGKENAKYLIEKIKLHDMQEGKCLYSLEAIPLEDLLNNPFNYEVDHIIPRSVSFDNSFNNKVLVKQEENSKKGNRTPFQYLSSSDSKISYETFKKHILNLAKGKGRISKTKKEYLLEERDINRFSVQKDFINRNLVDTRYATRGLMNLLRSYFRVNNLDVKVKSINGGFTSFLRRKWKFKKERNKGYKHHAEDALIIANADFIFKEWKKLDKAKKVMENQMFEEKQAESMPEIETEQEYKEIFITPHQIKHIKDFKDYKYSHRVDKKPNRELINDTLYSTRKDDKGNTLIVNNLNGLYDKDNDKLKKLINKSPEKLLMYHHDPQTYQKLKLIMEQYGDEKNPLYKYYEETGNYLTKYSKKDNGPVIKKIKYYGNKLNAHLDITDDYPNSRNKVVKLSLKPYRFDVYLDNGVYKFVTVKNLDVIKKENYYEVNSKCYEEAKKLKKISNQAEFIASFYNNDLIKINGELYRVIGVNNDLLNRIEVNMIDITYREYLENMNDKRPPRIIKTIASKTQSIKKYSTDILGNLYEVKSKKHPQIIKKGGSPKKKRKVSSDYKDHDGDYKDHDIDYKDDDDKSGGSTNLSDIIEKETGKQLVIQESILMLPEEVEEVIGNKPESDILVHTAYDESTDENVMLLTSDAPEYKPWALVIQDSNGENKIKMLSGGSPKKKRKV

SEQ ID NO: 120 - protein, 1824 aa, Artificial Sequence
  Description of Artificial Sequence: Synthetic polypeptide
MSSETGPVAVDPTLRRRIEPHEFEVFFDPRELRKETCLLYEINWGGRHSIWRHTSQNTNKHVEVNFIEKFTTERYFCPNTRCSITWFLSWSPCGECSRAITEFLSRYPHVTLFIYIARLYHHADPRNRQGLRDLISSGVTIQIMTEQESGYCWRNFVNYSPSNEAHWPRYPHLWVRLYVLELYCIILGLPPCLNILRRKQPQLTFFTIALQSCHYQRLPPHILWATGLKSGGSSGGSSGSETPGTSESATPESSGGSSGGSDKKYSIGLAIGTNSVGWAVITDEYKVPSKKFKVLGNTDRHSIKKNLIGALLFDSGETAEATRLKRTARRRYTRRKNRICYLQEIFSNEMAKVDDSFFHRLEESFLVEEDKKHERHPIFGNIVDEVAYHEKYPTIYHLRKKLVDSTDKADLRLIYLALAHMIKFRGHFLIEGDLNPDNSDVDKLFIQLVQTYNQLFEENPINASGVDAKAILSARLSKSRRLENLIAQLPGEKKNGLFGNLIALSLGLTPNFKSNFDLAEDAKLQLSKDTYDDDLDNLLAQIGDQYADLFLAAKNLSDAILLSDILRVNTEITKAPLSASMIKRYDEHHQDLTLLKALVRQQLPEKYKEIFFDQSKNGYAGYIDGGASQEEFYKFIKPILEKMDGTEELLVKLNREDLLRKQRTFDNGSIPHQIHLGELHAILRRQEDFYPFLKDNREKIEKILTFRIPYYVGPLARGNSRFAWMTRKSEETITPWNFEEVVDKGASAQSFIERMTNFDKNLPNEKVLPKHSLLYEYFTVYNELTKVKYVTEGMRKPAFLSGEQKKAIVDLLFKTNRKVTVKQLKEDYFKKIECFDSVEISGVEDRFNASLGTYHDLLKIIKDKDFLDNEENEDILEDIVLTLTLFEDREMIEERLKTYAHLFDDKVMKQLKRRRYTGWGRLSRKLINGIRDKQSGKTILDFLKSDGFANRNFMQLIHDDSLTFKEDIQKAQVSGQGDSLHEHIANLAGSPAIKKGILQTVKVVDELVKVMGRHKPENIVIEMARENQTTQKGQKNSRERMKRIEEGIKELGSQILKEHPVENTQLQNEKLYLYYLQNGRDMYVDQELDINRLSDYDVDHIVPQSFLKDDSIDNKVLTRSDKNRGKSDNVPSEEVVKKMKNYWRQLLNAKLITQRKFDNLTKAERGGLSELDKAGFIKRQLVETRQITKHVAQILDSRMNTKYDENDKLIREVKVITLKSKLVSDFRKDFQFYKVREINNYHHAHDAYLNAVVGTALIKKYPKLESEFVYGDYKVYDVRKMIAKSEQEIGKATAKYFFYSNIMNFFKTEITLANGEIRKRPLIETNGETGEIVWDKGRDFATVRKVLSMPQVNIVKKTEVQTGGFSKESILPKRNSDKLIARKKDWDPKKYGGFDSPTVAYSVLVVAKVEKGKSKKLKSVKELLGITIMERSSFEKNPIDFLEAKGYKEVKKDLIIKLPKYSLFELENGRKRMLASAGELQKGNELALPSKYVNFLYLASHYEKLKGSPEDNEQKQLFVEQHKHYLDEIIEQISEFSKRVILADANLDKVLSAYNKHRDKPIREQAENIIHLFTLTNLGAPAAFKYFDTTIDRKRYTSTKEVLDATLIHQSITGLYETRIDLSQLGGDSGGSGGSGGSTNLSDIIEKETGKQLVIQESILMLPEEVEEVIGNKPESDILVHTAYDESTDENVMLLTSDAPEYKPWALVIQDSNGENKIKMLSGGSGGSGGSTNLSDIIEKETGKQLVIQESILMLPEEVEEVIGNKPESDILVHTAYDESTDENVMLLTSDAPEYKPWALVIQDSNGENKIKMLSGGSPKKKRK

SEQ ID NO: 121 - protein, 2013 aa, Artificial Sequence
  Description of Artificial Sequence: Synthetic polypeptide
MAKPAKRIKSAAAAYVPQNRDAVITDIKRIGDLQREASRLETEMNDAIAEITEKFAARIAPIKTDIETLSKGVQGWCEANRDELTNGGKVKTANLVTGDVSWRVRPPSVSIRGMDAVMETLERLGLQRFIRTKQEINKEAILLEPKAVAGVAGITVKSGIEDFSIIPFEQEAGISGSETPGTSESATPESSSETGPVAVDPTLRRRIEPHEFEVFFDPRELRKETCLLYEINWGGRHSIWRHTSQNTNKHVEVNFIEKFTTERYFCPNTRCSITWFLSWSPCGECSRAITEFLSRYPHVTLFIYIARLYHHADPRNRQGLRDLISSGVTIQIMTEQESGYCWRNFVNYSPSNEAHWPRYPHLWVRLYVLELYCIILGLPPCLNILRRKQPQLTFFTIALQSCHYQRLPPHILWATGLKSGGSSGGSSGSETPGTSESATPESSGGSSGGSDKKYSIGLAIGTNSVGWAVITDEYKVPSKKFKVLGNTDRHSIKKNLIGALLFDSGETAEATRLKRTARRRYTRRKNRICYLQEIFSNEMAKVDDSFFHRLEESFLVEEDKKHERHPIFGNIVDEVAYHEKYPTIYHLRKKLVDSTDKADLRLIYLALAHMIKFRGHFLIEGDLNPDNSDVDKLFIQLVQTYNQLFEENPINASGVDAKAILSARLSKSRRLENLIAQLPGEKKNGLFGNLIALSLGLTPNFKSNFDLAEDAKLQLSKDTYDDDLDNLLAQIGDQYADLFLAAKNLSDAILLSDILRVNTEITKAPLSASMIKRYDEHHQDLTLLKALVRQQLPEKYKEIFFDQSKNGYAGYIDGGASQEEFYKFIKPILEKMDGTEELLVKLNREDLLRKQRTFDNGSIPHQIHLGELHAILRRQEDFYPFLKDNREKIEKILTFRIPYYVGPLARGNSRFAWMTRKSEETITPWNFEEVVDKGASAQSFIERMTNFDKNLPNEKVLPKHSLLYEYFTVYNELTKVKYVTEGMRKPAFLSGEQKKAIVDLLFKTNRKVTVKQLKEDYFKKIECFDSVEISGVEDRFNASLGTYHDLLKIIKDKDFLDNEENEDILEDIVLTLTLFEDREMIEERLKTYAHLFDDKVMKQLKRRRYTGWGRLSRKLINGIRDKQSGKTILDFLKSDGFANRNFMQLIHDDSLTFKEDIQKAQVSGQGDSLHEHIANLAGSPAIKKGILQTVKVVDELVKVMGRHKPENIVIEMARENQTTQKGQKNSRERMKRIEEGIKELGSQILKEHPVENTQLQNEKLYLYYLQNGRDMYVDQELDINRLSDYDVDHIVPQSFLKDDSIDNKVLTRSDKNRGKSDNVPSEEVVKKMKNYWRQLLNAKLITQRKFDNLTKAERGGLSELDKAGFIKRQLVETRQITKHVAQILDSRMNTKYDENDKLIREVKVITLKSKLVSDFRKDFQFYKVREINNYHHAHDAYLNAVVGTALIKKYPKLESEFVYGDYKVYDVRKMIAKSEQEIGKATAKYFFYSNIMNFFKTEITLANGEIRKRPLIETNGETGEIVWDKGRDFATVRKVLSMPQVNIVKKTEVQTGGFSKESILPKRNSDKLIARKKDWDPKKYGGFDSPTVAYSVLVVAKVEKGKSKKLKSVKELLGITIMERSSFEKNPIDFLEAKGYKEVKKDLIIKLPKYSLFELENGRKRMLASAGELQKGNELALPSKYVNFLYLASHYEKLKGSPEDNEQKQLFVEQHKHYLDEIIEQISEFSKRVILADANLDKVLSAYNKHRDKPIREQAENIIHLFTLTNLGAPAAFKYFDTTIDRKRYTSTKEVLDATLIHQSITGLYETRIDLSQLGGDSGGSGGSGGSTNLSDIIEKETGKQLVIQESILMLPEEVEEVIGNKPESDILVHTAYDESTDENVMLLTSDAPEYKPWALVIQDSNGENKIKMLSGGSGGSGGSTNLSDIIEKETGKQLVIQESILMLPEEVEEVIGNKPESDILVHTAYDESTDENVMLLTSDAPEYKPWALVIQDSNGENKIKMLSGGSPKKKRK

SEQ ID NO: 122 - protein, 1544 aa, Artificial Sequence
  Description of Artificial Sequence: Synthetic polypeptide
MSSETGPVAVDPTLRRRIEPHEFEVFFDPRELRKETCLLYEINWGGRHSIWRHTSQNTNKHVEVNFIEKFTTERYFCPNTRCSITWFLSWSPCGECSRAITEFLSRYPHVTLFIYIARLYHHADPRNRQGLRDLISSGVTIQIMTEQESGYCWRNFVNYSPSNEAHWPRYPHLWVRLYVLELYCIILGLPPCLNILRRKQPQLTFFTIALQSCHYQRLPPHILWATGLKSGGSSGGSSGSETPGTSESATPESSGGSSGGSGKRNYILGLAIGITSVGYGIIDYETRDVIDAGVRLFKEANVENNEGRRSKRGARRLKRRRRHRIQRVKKLLFDYNLLTDHSELSGINPYEARVKGLSQKLSEEEFSAALLHLAKRRGVHNVNEVEEDTGNELSTKEQISRNSKALEEKYVAELQLERLKKDGEVRGSINRFKTSDYVKEAKQLLKVQKAYHQLDQSFIDTYIDLLETRRTYYEGPGEGSPFGWKDIKEWYEMLMGHCTYFPEELRSVKYAYNADLYNALNDLNNLVITRDENEKLEYYEKFQIIENVFKQKKKPTLKQIAKEILVNEEDIKGYRVTSTGKPEFTNLKVYHDIKDITARKEIIENAELLDQIAKILTIYQSSEDIQEELTNLNSELTQEEIEQISNLKGYTGTHNLSLKAINLILDELWHTNDNQIAIFNRLKLVPKKVDLSQQKEIPTTLVDDFILSPVVKRSFIQSIKVINAIIKKYGLPNDIIIELAREKNSKDAQKMINEMQKRNRQTNERIEEIIRTTGKENAKYLIEKIKLHDMQEGKCLYSLEAIPLEDLLNNPFNYEVDHIIPRSVSFDNSFNNKVLVKQEENSKKGNRTPFQYLSSSDSKISYETFKKHILNLAKGKGRISKTKKEYLLEERDINRFSVQKDFINRNLVDTRYATRGLMNLLRSYFRVNNLDVKVKSINGGFTSFLRRKWKFKKERNKGYKHHAEDALIIANADFIFKEWKKLDKAKKVMENQMFEEKQAESMPEIETEQEYKEIFITPHQIKHIKDFKDYKYSHRVDKKPNRELINDTLYSTRKDDKGNTLIVNNLNGLYDKDNDKLKKLINKSPEKLLMYHHDPQTYQKLKLIMEQYGDEKNPLYKYYEETGNYLTKYSKKDNGPVIKKIKYYGNKLNAHLDITDDYPNSRNKVVKLSLKPYRFDVYLDNGVYKFVTVKNLDVIKKENYYEVNSKCYEEAKKLKKISNQAEFIASFYNNDLIKINGELYRVIGVNNDLLNRIEVNMIDITYREYLENMNDKRPPRIIKTIASKTQSIKKYSTDILGNLYEVKSKKHPQIIKKGGSPKKKRKVSSDYKDHDGDYKDHDIDYKDDDDKSGGSGGSGGSTNLSDIIEKETGKQLVIQESILMLPEEVEEVIGNKPESDILVHTAYDESTDENVMLLTSDAPEYKPWALVIQDSNGENKIKMLSGGSGGSGGSTNLSDIIEKETGKQLVIQESILMLPEEVEEVIGNKPESDILVHTAYDESTDENVMLLTSDAPEYKPWALVIQDSNGENKIKMLSGGSPKKKRKV

SEQ ID NO: 123 - protein, 1733 aa, Artificial Sequence
  Description of Artificial Sequence: Synthetic polypeptide
MAKPAKRIKSAAAAYVPQNRDAVITDIKRIGDLQREASRLETEMNDAIAEITEKFAARIAPIKTDIETLSKGVQGWCEANRDELTNGGKVKTANLVTGDVSWRVRPPSVSIRGMDAVMETLERLGLQRFIRTKQEINKEAILLEPKAVAGVAGITVKSGIEDFSIIPFEQEAGISGSETPGTSESATPESSSETGPVAVDPTLRRRIEPHEFEVFFDPRELRKETCLLYEINWGGRHSIWRHTSQNTNKHVEVNFIEKFTTERYFCPNTRCSITWFLSWSPCGECSRAITEFLSRYPHVTLFIYIARLYHHADPRNRQGLRDLISSGVTIQIMTEQESGYCWRNFVNYSPSNEAHWPRYPHLWVRLYVLELYCIILGLPPCLNILRRKQPQLTFFTIALQSCHYQRLPPHILWATGLKSGGSSGGSSGSETPGTSESATPESSGGSSGGSGKRNYILGLAIGITSVGYGIIDYETRDVIDAGVRLFKEANVENNEGRRSKRGARRLKRRRRHRIQRVKKLLFDYNLLTDHSELSGINPYEARVKGLSQKLSEEEFSAALLHLAKRRGVHNVNEVEEDTGNELSTKEQISRNSKALEEKYVAELQLERLKKDGEVRGSINRFKTSDYVKEAKQLLKVQKAYHQLDQSFIDTYIDLLETRRTYYEGPGEGSPFGWKDIKEWYEMLMGHCTYFPEELRSVKYAYNADLYNALNDLNNLVITRDENEKLEYYEKFQIIENVFKQKKKPTLKQIAKEILVNEEDIKGYRVTSTGKPEFTNLKVYHDIKDITARKEIIENAELLDQIAKILTIYQSSEDIQEELTNLNSELTQEEIEQISNLKGYTGTHNLSLKAINLILDELWHTNDNQIAIFNRLKLVPKKVDLSQQKEIPTTLVDDFILSPVVKRSFIQSIKVINAIIKKYGLPNDIIIELAREKNSKDAQKMINEMQKRNRQTNERIEEIIRTTGKENAKYLIEKIKLHDMQEGKCLYSLEAIPLEDLLNNPFNYEVDHIIPRSVSFDNSFNNKVLVKQEENSKKGNRTPFQYLSSSDSKISYETFKKHILNLAKGKGRISKTKKEYLLEERDINRFSVQKDFINRNLVDTRYATRGLMNLLRSYFRVNNLDVKVKSINGGFTSFLRRKWKFKKERNKGYKHHAEDALIIANADFIFKEWKKLDKAKKVMENQMFEEKQAESMPEIETEQEYKEIFITPHQIKHIKDFKDYKYSHRVDKKPNRELINDTLYSTRKDDKGNTLIVNNLNGLYDKDNDKLKKLINKSPEKLLMYHHDPQTYQKLKLIMEQYGDEKNPLYKYYEETGNYLTKYSKKDNGPVIKKIKYYGNKLNAHLDITDDYPNSRNKVVKLSLKPYRFDVYLDNGVYKFVTVKNLDVIKKENYYEVNSKCYEEAKKLKKISNQAEFIASFYNNDLIKINGELYRVIGVNNDLLNRIEVNMIDITYREYLENMNDKRPPRIIKTIASKTQSIKKYSTDILGNLYEVKSKKHPQIIKKGGSPKKKRKVSSDYKDHDGDYKDHDIDYKDDDDKSGGSGGSGGSTNLSDIIEKETGKQLVIQESILMLPEEVEEVIGNKPESDILVHTAYDESTDENVMLLTSDAPEYKPWALVIQDSNGENKIKMLSGGSGGSGGSTNLSDIIEKETGKQLVIQESILMLPEEVEEVIGNKPESDILVHTAYDESTDENVMLLTSDAPEYKPWALVIQDSNGENKIKMLSGGSPKKKRKV

SEQ ID NO: 124 - protein, 1853 aa, Artificial Sequence
  Description of Artificial Sequence: Synthetic polypeptide
  MOD_RES (20)..(247): This region may encompass one of the following sequences: "[sequence omitted] [sequence omitted] [sequence omitted]
  MOD_RES (20)..(247): CONT. FROM ABOVE: [sequence omitted] [sequence omitted]" or "[sequence omitted] YEIKWGTSHKIWRHSSKNTTKHVEVNFIEKFTSERHFCPSTSCSITWFLSWSPCGECS KAITEFLSQHPNVTLVIYVARLYHHMDQQNRQGLRDLVNSGVTIQIMTAPEYDYCWRN
  MOD_RES (20)..(247): CONT. FROM ABOVE: FVNYPPGKEAHWPRYPPLWMKLYALELHAGILGLPPCLNI [sequence omitted]" or "[sequence omitted] EPHEFEVFFDPRELRKEACLLYEIKWGTSHKIWRNSGKNTTKHVEVNFIEKFTSERHF CPSISCSITWFLSWSPCWECSKAIREFLSQHPNVTLVIYVARLFQHMDQQNRQGLRDL
  MOD_RES (20)..(247): CONT. FROM ABOVE: VNSGVTIQIMTASEYDHCWRNFVNYPPGKEAHWPRYPPLW MKLYALELHAGILGLPPCLNILRRKQPQLTFFTIALQSCHYQRLPPHILWATGLK" or "SSETGPVAVDPTLRRRIEPEFFNRNYDPRELRKETYLLYEIKWGKESKIWRHTSNNR TQHAEVNFLENFFNELYFNPSTHCSITWFLSWSPCGECSKAIVEFLKEHPNVNLEIYV
  MOD_RES (20)..(247): CONT. FROM ABOVE: ARLYLCEDERNRQGLRDLVNSGVTIRIMNLPDYNYCWRTF VSHQGGDEDYWPRHFAPWVRLYVLELYCIILGLPPCLNILRRKQPQLTFFTIALQSCH [sequence omitted]" or "SSETGPVAVDPTLRRRIEPFYFQFNNDPRACRRKTY LCYELKQDGSTWVWKRTLHNKGRHAEICFLEKISSLEKLDPAQHYRITWYMSWSPCSN
  MOD_RES (20)..(247): CONT. FROM ABOVE: CAQKIVDFLKEHPHVNLRIYVARLYYHEEERYQEGLRNLR RSGVSIRVMDLPDFEHCWETFVDNGGGPFQPWPGLEELNSKQLSRRLQAGILGLPPCL [sequence omitted]" or " [sequence omitted] RIEPFHFQFNNDPRAYRRKTYLCYELKQDGSTWVLDRTLRNKGRHAEICFLDKINSWE
  MOD_RES (20)..(247): CONT. FROM ABOVE: RLDPAQHYRVTWYMSWSPCSNCAQQVVDFLKEHPHVNLRI FAARLYYHEQRRYQEGLRSLRGSGVPVAVMTLPDFEHCWETFVDHGGRPFQPWDGLEE LNSRSLSRRLQAGILGLPPCLNILRRKQPQLTFFTIALQSCHYQRLPPHILWATGLK" or "EFFNRNYDPRELRKETYLLYEIKWGKESKIWRHWCTSNNRTQHAEVNFLENFFN
  MOD_RES (20)..(247): CONT. FROM ABOVE: ELYFNPSTHCSITWFLSWSPCGECSKAIVEFLKEHPNVNL EIYVARLYLCEDERNRQGLRDLVNSGVTIRIMNLPDYNYCWRTFVSHQGGDEDYWPRH FAPWVRL" or "FHFQFNNDPRAYRRKTYLCYELKQDGSTWVLDRGCTLRNKGRHA EICFLDKINSWERLDPAQHYRVTWYMSWSPCSNCAQQVVDFLKEHPHVNLRIFAARLY
  MOD_RES (20)..(247): CONT. FROM ABOVE: YHEQRRYQEGLRSLRGSGVPVAVMTLPDFEHCWETFVDHG GRPFQPWDGLEELNSRSLSRRLQAG" or "FERNYDPRELRKETYLLYEIKWGKSG KLWRHWCQNNRTQHAEVYFLENIFNARRFNPSTHCSITWYLSWSPCAECSQKIVDFLK EHPNVNLEIYVARLYYHEDERNRQGLRDLVNSGVTIRIMDLPDYNYCWKTFVSDQGGD
  MOD_RES (20)..(247): CONT. FROM ABOVE: EDYWPGHFAPWIKQYSLKL" or "FYFQFNNDPRACRRK TYLCYELKQDGSTWVWKRGCTLHNKGRHAEICFLEKISSLEKLDPAQHYRITWYMSWS PCSNCAQKIVDFLKEHPHVNLRIYVARLYYHEEERYQEGLRNLRRSGVSIRVMDLPDF EHCWETFVDNGGGPFQPWPGLEENSKQLSRRLQAG" or "FYEEFNNTLKSCRHKTL
  MOD_RES (20)..(247): CONT. FROM ABOVE: LCFSLKQDENTTLWKWGYAHNNGRHAEILVLREIENYEKL DPAAKYRITLYMSYSPCNDCADKIVDFLKKHPNVNLNIKVSRLYYHEDEKYQEGLRNL KQPGVSLKVMDRSDFEECFDLFVDPGGGEFQPWPGLEEKSKQYSATLQAG"
  See specification as filed for detailed description of substitutions and preferred embodiments
MKRTADGSEFESPKKKRKVXXXXXXXXXXXXXXXXXXXXXXXXXXXXXXXXXXXXXXXXXXXXXXXXXXXXXXXXXXXXXXXXXXXXXXXXXXXXXXXXXXXXXXXXXXXXXXXXXXXXXXXXXXXXXXXXXXXXXXXXXXXXXXXXXXXXXXXXXXXXXXXXXXXXXXXXXXXXXXXXXXXXXXXXXXXXXXXXXXXXXXXXXXXXXXXXXXXXXXXXXXXXXXXXXXXXXXXXXXXXXXXXXXXXSGGSSGGSSGSETPGTSESATPESSGGSSGGSDKKYSIGLAIGTNSVGWAVITDEYKVPSKKFKVLGNTDRHSIKKNLIGALLFDSGETAEATRLKRTARRRYTRRKNRICYLQEIFSNEMAKVDDSFFHRLEESFLVEEDKKHERHPIFGNIVDEVAYHEKYPTIYHLRKKLVDSTDKADLRLIYLALAHMIKFRGHFLIEGDLNPDNSDVDKLFIQLVQTYNQLFEENPINASGVDAKAILSARLSKSRRLENLIAQLPGEKKNGLFGNLIALSLGLTPNFKSNFDLAEDAKLQLSKDTYDDDLDNLLAQIGDQYADLFLAAKNLSDAILLSDILRVNTEITKAPLSASMIKRYDEHHQDLTLLKALVRQQLPEKYKEIFFDQSKNGYAGYIDGGASQEEFYKFIKPILEKMDGTEELLVKLNREDLLRKQRTFDNGSIPHQIHLGELHAILRRQEDFYPFLKDNREKIEKILTFRIPYYVGPLARGNSRFAWMTRKSEETITPWNFEEVVDKGASAQSFIERMTNFDKNLPNEKVLPKHSLLYEYFTVYNELTKVKYVTEGMRKPAFLSGEQKKAIVDLLFKTNRKVTVKQLKEDYFKKIECFDSVEISGVEDRFNASLGTYHDLLKIIKDKDFLDNEENEDILEDIVLTLTLFEDREMIEERLKTYAHLFDDKVMKQLKRRRYTGWGRLSRKLINGIRDKQSGKTILDFLKSDGFANRNFMQLIHDDSLTFKEDIQKAQVSGQGDSLHEHIANLAGSPAIKKGILQTVKVVDELVKVMGRHKPENIVIEMARENQTTQKGQKNSRERMKRIEEGIKELGSQILKEHPVENTQLQNEKLYLYYLQNGRDMYVDQELDINRLSDYDVDHIVPQSFLKDDSIDNKVLTRSDKNRGKSDNVPSEEVVKKMKNYWRQLLNAKLITQRKFDNLTKAERGGLSELDKAGFIKRQLVETRQITKHVAQILDSRMNTKYDENDKLIREVKVITLKSKLVSDFRKDFQFYKVREINNYHHAHDAYLNAVVGTALIKKYPKLESEFVYGDYKVYDVRKMIAKSEQEIGKATAKYFFYSNIMNFFKTEITLANGEIRKRPLIETNGETGEIVWDKGRDFATVRKVLSMPQVNIVKKTEVQTGGFSKESILPKRNSDKLIARKKDWDPKKYGGFDSPTVAYSVLVVAKVEKGKSKKLKSVKELLGITIMERSSFEKNPIDFLEAKGYKEVKKDLIIKLPKYSLFELENGRKRMLASAGELQKGNELALPSKYVNFLYLASHYEKLKGSPEDNEQKQLFVEQHKHYLDEIIEQISEFSKRVILADANLDKVLSAYNKHRDKPIREQAENIIHLFTLTNLGAPAAFKYFDTTIDRKRYTSTKEVLDATLIHQSITGLYETRIDLSQLGGDSGGSGGSGGSTNLSDIIEKETGKQLVIQESILMLPEEVEEVIGNKPESDILVHTAYDESTDENVMLLTSDAPEYKPWALVIQDSNGENKIKMLSGGSGGSGGSTNLSDIIEKETGKQLVIQESILMLPEEVEEVIGNKPESDILVHTAYDESTDENVMLLTSDAPEYKPWALVIQDSNGENKIKMLSGGSKRTADGSEFEPKKKRKV

SEQ ID NO: 125 - protein, 228 aa, Rattus sp.
SSETGPVAVDPTLRRRIEPHEFEVFFDPRELRKETCLLYEINWGGRHSIWRHTSQNTNKHVEVNFIEKFTTERYFCPNTRCSITWFLSWSPCGECSRAITEFLSRYPHVTLFIYIARLYHHADPRNRQGLRDLISSGVTIQIMTEQESGYCWRNFVNYSPSNEAHWPRYPHLWVRLYVLELYCIILGLPPCLNILRRKQPQLTFFTIALQSCHYQRLPPHILWATGLK

SEQ ID NO: 126 - protein, 228 aa, Artificial Sequence
  Description of Artificial Sequence: Synthetic polypeptide
SSETGPVAVDPTLRRRIEPHEFEVFFDPRELRKETCLLYEIKWGTSHKIWRHSSKNTTKHVEVNFIEKFTSERHFCPSTSCSITWFLSWSPCGECSKAITEFLSQHPNVTLVIYVARLYHHMDQQNRQGLRDLVNSGVTIQIMTAPEYDYCWRNFVNYPPGKEAHWPRYPPLWMKLYALELHAGILGLPPCLNILRRKQPQLTFFTIALQSCHYQRLPPHILWATGLK

SEQ ID NO: 127 - protein, 228 aa, Artificial Sequence
  Description of Artificial Sequence: Synthetic polypeptide
SSETGPVAVDPTLRRRIEPHEFEVFFDPRELRKEACLLYEIKWGTSHKIWRNSGKNTTKHVEVNFIEKFTSERHFCPSISCSITWFLSWSPCWECSKAIREFLSQHPNVTLVIYVARLFQHMDQQNRQGLRDLVNSGVTIQIMTASEYDHCWRNFVNYPPGKEAHWPRYPPLWMKLYALELHAGILGLPPCLNILRRKQPQLTFFTIALQSCHYQRLPPHILWATGLK

SEQ ID NO: 128 - protein, 228 aa, Artificial Sequence
  Description of Artificial Sequence: Synthetic polypeptide
SSETGPVAVDPTLRRRIEPEFFNRNYDPRELRKETYLLYEIKWGKESKIWRHTSNNRTQHAEVNFLENFFNELYFNPSTHCSITWFLSWSPCGECSKAIVEFLKEHPNVNLEIYVARLYLCEDERNRQGLRDLVNSGVTIRIMNLPDYNYCWRTFVSHQGGDEDYWPRHFAPWVRLYVLELYCIILGLPPCLNILRRKQPQLTFFTIALQSCHYQRLPPHILWATGLK

SEQ ID NO: 129 - protein, 228 aa, Artificial Sequence
  Description of Artificial Sequence: Synthetic polypeptide
SSETGPVAVDPTLRRRIEPFYFQFNNDPRACRRKTYLCYELKQDGSTWVWKRTLHNKGRHAEICFLEKISSLEKLDPAQHYRITWYMSWSPCSNCAQKIVDFLKEHPHVNLRIYVARLYYHEEERYQEGLRNLRRSGVSIRVMDLPDFEHCWETFVDNGGGPFQPWPGLEELNSKQLSRRLQAGILGLPPCLNILRRKQPQLTFFTIALQSCHYQRLPPHILWATGLK

SEQ ID NO: 130 - protein, 228 aa, Artificial Sequence
  Description of Artificial Sequence: Synthetic polypeptide
SSETGPVAVDPTLRRRIEPFHFQFNNDPRAYRRKTYLCYELKQDGSTWVLDRTLRNKGRHAEICFLDKINSWERLDPAQHYRVTWYMSWSPCSNCAQQVVDFLKEHPHVNLRIFAARLYYHEQRRYQEGLRSLRGSGVPVAVMTLPDFEHCWETFVDHGGRPFQPWDGLEELNSRSLSRRLQAGILGLPPCLNILRRKQPQLTFFTIALQSCHYQRLPPHILWATGLK

SEQ ID NO: 131 - protein, 159 aa, Artificial Sequence
  Description of Artificial Sequence: Synthetic polypeptide
EFFNRNYDPRELRKETYLLYEIKWGKESKIWRHWCTSNNRTQHAEVNFLENFFNELYFNPSTHCSITWFLSWSPCGECSKAIVEFLKEHPNVNLEIYVARLYLCEDERNRQGLRDLVNSGVTIRIMNLPDYNYCWRTFVSHQGGDEDYWPRHFAPWVRL

SEQ ID NO: 132 - protein, 167 aa, Artificial Sequence
  Description of Artificial Sequence: Synthetic polypeptide
FHFQFNNDPRAYRRKTYLCYELKQDGSTWVLDRGCTLRNKGRHAEICFLDKINSWERLDPAQHYRVTWYMSWSPCSNCAQQVVDFLKEHPHVNLRIFAARLYYHEQRRYQEGLRSLRGSGVPVAVMTLPDFEHCWETFVDHGGRPFQPWDGLEELNSRSLSRRLQAG

SEQ ID NO: 133 - protein, 161 aa, Artificial Sequence
  Description of Artificial Sequence: Synthetic polypeptide
FERNYDPRELRKETYLLYEIKWGKSGKLWRHWCQNNRTQHAEVYFLENIFNARRFNPSTHCSITWYLSWSPCAECSQKIVDFLKEHPNVNLEIYVARLYYHEDERNRQGLRDLVNSGVTIRIMDLPDYNYCWKTFVSDQGGDEDYWPGHFAPWIKQYSLKL

SEQ ID NO: 134 - protein, 166 aa, Artificial Sequence
  Description of Artificial Sequence: Synthetic polypeptide
FYFQFNNDPRACRRKTYLCYELKQDGSTWVWKRGCTLHNKGRHAEICFLEKISSLEKLDPAQHYRITWYMSWSPCSNCAQKIVDFLKEHPHVNLRIYVARLYYHEEERYQEGLRNLRRSGVSIRVMDLPDFEHCWETFVDNGGGPFQPWPGLEENSKQLSRRLQAG

SEQ ID NO: 135 - protein, 165 aa, Artificial Sequence
  Description of Artificial Sequence: Synthetic polypeptide
FYEEFNNTLKSCRHKTLLCFSLKQDENTTLWKWGYAHNNGRHAEILVLREIENYEKLDPAAKYRITLYMSYSPCNDCADKIVDFLKKHPNVNLNIKVSRLYYHEDEKYQEGLRNLKQPGVSLKVMDRSDFEECFDLFVDPGGGEFQPWPGLEEKSKQYSATLQAG

SEQ ID NO: 136 - protein, 1774 aa, Artificial Sequence
  Description of Artificial Sequence: Synthetic polypeptide
MSEVEFSHEYWMRHALTLAKRAWDEREVPVGAVLVHNNRVIGEGWNRPIGRHDPTAHAEIMALRQGGLVMQNYRLIDATYVTLEPCVMCAGAMIHSRIGRVVFGARDAKTGAAGSLMDVLHHPGMNHRVEITEGILADECAALLSDFFRMRRQEIKAQKKAQSSTDSGGSSGGSSGSETPGTSESATPESSGGSSGGSSEVEFSHEYWMRHALTLAKRAWDEREVPVGAVLVLNNRVIGEGWNRSIGLHDPTAHAEIMALRQGGLVMQNYRLIDATLYVTFEPCVMCAGAMIHSRIGRVVFGVRNAKTGAAGSLMDVLHYPGMNHRVEITEGILADECAALLCYFFRMRRQVFNAQKKAQSSTDSGGSSGGSSGSETPGTSESATPESSGGSSGGSDKKYSIGLAIGTNSVGWAVITDEYKVPSKKFKVLGNTDRHSIKKNLIGALLFDSGETAEATRLKRTARRRYTRRKNRICYLQEIFSNEMAKVDDSFFHRLEESFLVEEDKKHERHPIFGNIVDEVAYHEKYPTIYHLRKKLVDSTDKADLRLIYLALAHMIKFRGHFLIEGDLNPDNSDVDKLFIQLVQTYNQLFEENPINASGVDAKAILSARLSKSRRLENLIAQLPGEKKNGLFGNLIALSLGLTPNFKSNFDLAEDAKLQLSKDTYDDDLDNLLAQIGDQYADLFLAAKNLSDAILLSDILRVNTEITKAPLSASMIKRYDEHHQDLTLLKALVRQQLPEKYKEIFFDQSKNGYAGYIDGGASQEEFYKFIKPILEKMDGTEELLVKLNREDLLRKQRTFDNGSIPHQIHLGELHAILRRQEDFYPFLKDNREKIEKILTFRIPYYVGPLARGNSRFAWMTRKSEETITPWNFEEVVDKGASAQSFIERMTNFDKNLPNEKVLPKHSLLYEYFTVYNELTKVKYVTEGMRKPAFLSGEQKKAIVDLLFKTNRKVTVKQLKEDYFKKIECFDSVEISGVEDRFNASLGTYHDLLKIIKDKDFLDNEENEDILEDIVLTLTLFEDREMIEERLKTYAHLFDDKVMKQLKRRRYTGWGRLSRKLINGIRDKQSGKTILDFLKSDGFANRNFMQLIHDDSLTFKEDIQKAQVSGQGDSLHEHIANLAGSPAIKKGILQTVKVVDELVKVMGRHKPENIVIEMARENQTTQKGQKNSRERMKRIEEGIKELGSQILKEHPVENTQLQNEKLYLYYLQNGRDMYVDQELDINRLSDYDVDHIVPQSFLKDDSIDNKVLTRSDKNRGKSDNVPSEEVVKKMKNYWRQLLNAKLITQRKFDNLTKAERGGLSELDKAGFIKRQLVETRQITKHVAQILDSRMNTKYDENDKLIREVKVITLKSKLVSDFRKDFQFYKVREINNYHHAHDAYLNAVVGTALIKKYPKLESEFVYGDYKVYDVRKMIAKSEQEIGKATAKYFFYSNIMNFFKTEITLANGEIRKRPLIETNGETGEIVWDKGRDFATVRKVLSMPQVNIVKKTEVQTGGFSKESILPKRNSDKLIARKKDWDPKKYGGFDSPTVAYSVLVVAKVEKGKSKKLKSVKELLGITIMERSSFEKNPIDFLEAKGYKEVKKDLIIKLPKYSLFELENGRKRMLASAGELQKGNELALPSKYVNFLYLASHYEKLKGSPEDNEQKQLFVEQHKHYLDEIIEQISEFSKRVILADANLDKVLSAYNKHRDKPIREQAENIIHLFTLTNLGAPAAFKYFDTTIDRKRYTSTKEVLDATLIHQSITGLYETRIDLSQLGGDSGGSPKKKRKV

SEQ ID NO: 137 - protein, 1775 aa, Artificial Sequence
  Description of Artificial Sequence: Synthetic polypeptide
MSEVEFSHEYWMRHALTLAKRAWDEREVPVGAVLVHNNRVIGEGWNRPIGRHDPTAHAEIMALRQGGLVMQNYRLIDATLYVTLEPCVMCAGAMIHSRIGRVVFGARDAKTGAAGSLMDVLHHPGMNHRVEITEGILADECAALLSDFFRMRRQEIKAQKKAQSSTDSGGSSGGSSGSETPGTSESATPESSGGSSGGSSEVEFSHEYWMRHALTLAKRALDEREVPVGAVLVLNNRVIGEGWNRAIGLHDPTAHAEIMALRQGGLVMQNYRLIDATLYVTFEPCVMCAGAMIHSRIGRVVFGVRNAKTGAAGSLMDVLHYPGMNHRVEITEGILADECNALLCYFFRMRRQVFNAQKKAQSSTDSGGSSGGSSGSETPGTSESATPESSGGSSGGSDKKYSIGLAIGTNSVGWAVITDEYKVPSKKFKVLGNTDRHSIKKNLIGALLFDSGETAEATRLKRTARRRYTRRKNRICYLQEIFSNEMAKVDDSFFHRLEESFLVEEDKKHERHPIFGNIVDEVAYHEKYPTIYHLRKKLVDSTDKADLRLIYLALAHMIKFRGHFLIEGDLNPDNSDVDKLFIQLVQTYNQLFEENPINASGVDAKAILSARLSKSRRLENLIAQLPGEKKNGLFGNLIALSLGLTPNFKSNFDLAEDAKLQLSKDTYDDDLDNLLAQIGDQYADLFLAAKNLSDAILLSDILRVNTEITKAPLSASMIKRYDEHHQDLTLLKALVRQQLPEKYKEIFFDQSKNGYAGYIDGGASQEEFYKFIKPILEKMDGTEELLVKLNREDLLRKQRTFDNGSIPHQIHLGELHAILRRQEDFYPFLKDNREKIEKILTFRIPYYVGPLARGNSRFAWMTRKSEETITPWNFEEVVDKGASAQSFIERMTNFDKNLPNEKVLPKHSLLYEYFTVYNELTKVKYVTEGMRKPAFLSGEQKKAIVDLLFKTNRKVTVKQLKEDYFKKIECFDSVEISGVEDRFNASLGTYHDLLKIIKDKDFLDNEENEDILEDIVLTLTLFEDREMIEERLKTYAHLFDDKVMKQLKRRRYTGWGRLSRKLINGIRDKQSGKTILDFLKSDGFANRNFMQLIHDDSLTFKEDIQKAQVSGQGDSLHEHIANLAGSPAIKKGILQTVKVVDELVKVMGRHKPENIVIEMARENQTTQKGQKNSRERMKRIEEGIKELGSQILKEHPVENTQLQNEKLYLYYLQNGRDMYVDQELDINRLSDYDVDHIVPQSFLKDDSIDNKVLTRSDKNRGKSDNVPSEEVVKKMKNYWRQLLNAKLITQRKFDNLTKAERGGLSELDKAGFIKRQLVETRQITKHVAQILDSRMNTKYDENDKLIREVKVITLKSKLVSDFRKDFQFYKVREINNYHHAHDAYLNAVVGTALIKKYPKLESEFVYGDYKVYDVRKMIAKSEQEIGKATAKYFFYSNIMNFFKTEITLANGEIRKRPLIETNGETGEIVWDKGRDFATVRKVLSMPQVNIVKKTEVQTGGFSKESILPKRNSDKLIARKKDWDPKKYGGFDSPTVAYSVLVVAKVEKGKSKKLKSVKELLGITIMERSSFEKNPIDFLEAKGYKEVKKDLIIKLPKYSLFELENGRKRMLASAGELQKGNELALPSKYVNFLYLASHYEKLKGSPEDNEQKQLFVEQHKHYLDEIIEQISEFSKRVILADANLDKVLSAYNKHRDKPIREQAENIIHLFTLTNLGAPAAFKYFDTTIDRKRYTSTKEVLDATLIHQSITGLYETRIDLSQLGGDSGGSPKKKRKV

SEQ ID NO: 138 - protein, 1775 aa, Artificial Sequence
  Description of Artificial Sequence: Synthetic polypeptide
MSEVEFSHEYWMRHALTLAKRAWDEREVPVGAVLVHNNRVIGEGWNRPIGRHDPTAHAEIMALRQGGLVMQNYRLIDATLYVTLEPCVMCAGAMIHSRIGRVVFGARDAKTGAAGSLMDVLHHPGMNHRVEITEGILADECAALLSDFFRMRRQEIKAQKKAQSSTDSGGSSGGSSGSETPGTSESATPESSGGSSGGSSEVEFSHEYWMRHALTLAKRALDEREVPVGAVLVLNNRVIGEGWNRAIGLHDPTAHAEIMALRQGGLVMQNYRLIDATLYVTFEPCVMCAGAMIHSRIGRVVFGVRNAKTGAAGSLMDVLHYPGMNHRVEITEGILADECNALLCYFFRMPRQVFNAQKKAQSSTDSGGSSGGSSGSETPGTSESATPESSGGSSGGSDKKYSIGLAIGTNSVGWAVITDEYKVPSKKFKVLGNTDRHSIKKNLIGALLFDSGETAEATRLKRTARRRYTRRKNRICYLQEIFSNEMAKVDDSFFHRLEESFLVEEDKKHERHPIFGNIVDEVAYHEKYPTIYHLRKKLVDSTDKADLRLIYLALAHMIKFRGHFLIEGDLNPDNSDVDKLFIQLVQTYNQLFEENPINASGVDAKAILSARLSKSRRLENLIAQLPGEKKNGLFGNLIALSLGLTPNFKSNFDLAEDAKLQLSKDTYDDDLDNLLAQIGDQYADLFLAAKNLSDAILLSDILRVNTEITKAPLSASMIKRYDEHHQDLTLLKALVRQQLPEKYKEIFFDQSKNGYAGYIDGGASQEEFYKFIKPILEKMDGTEELLVKLNREDLLRKQRTFDNGSIPHQIHLGELHAILRRQEDFYPFLKDNREKIEKILTFRIPYYVGPLARGNSRFAWMTRKSEETITPWNFEEVVDKGASAQSFIERMTNFDKNLPNEKVLPKHSLLYEYFTVYNELTKVKYVTEGMRKPAFLSGEQKKAIVDLLFKTNRKVTVKQLKEDYFKKIECFDSVEISGVEDRFNASLGTYHDLLKIIKDKDFLDNEENEDILEDIVLTLTLFEDREMIEERLKTYAHLFDDKVMKQLKRRRYTGWGRLSRKLINGIRDKQSGKTILDFLKSDGFANRNFMQLIHDDSLTFKEDIQKAQVSGQGDSLHEHIANLAGSPAIKKGILQTVKVVDELVKVMGRHKPENIVIEMARENQTTQKGQKNSRERMKRIEEGIKELGSQILKEHPVENTQLQNEKLYLYYLQNGRDMYVDQELDINRLSDYDVDHIVPQSFLKDDSIDNKVLTRSDKNRGKSDNVPSEEVVKKMKNYWRQLLNAKLITQRKFDNLTKAERGGLSELDKAGFIKRQLVETRQITKHVAQILDSRMNTKYDENDKLIREVKVITLKSKLVSDFRKDFQFYKVREINNYHHAHDAYLNAVVGTALIKKYPKLESEFVYGDYKVYDVRKMIAKSEQEIGKATAKYFFYSNIMNFFKTEITLANGEIRKRPLIETNGETGEIVWDKGRDFATVRKVLSMPQVNIVKKTEVQTGGFSKESILPKRNSDKLIARKKDWDPKKYGGFDSPTVAYSVLVVAKVEKGKSKKLKSVKELLGITIMERSSFEKNPIDFLEAKGYKEVKKDLIIKLPKYSLFELENGRKRMLASAGELQKGNELALPSKYVNFLYLASHYEKLKGSPEDNEQKQLFVEQHKHYLDEIIEQISEFSKRVILADANLDKVLSAYNKHRDKPIREQAENIIHLFTLTNLGAPAAFKYFDTTIDRKRYTSTKEVLDATLIHQSITGLYETRIDLSQLGGDSGGSPKKKRKV

SEQ ID NO: 139 - protein, 1775 aa, Artificial Sequence
  Description of Artificial Sequence: Synthetic polypeptide
MSEVEFSHEYWMRHALTLAKRAWDEREVPVGAVLVHNNRVIGEGWNRPIGRHDPTAHAEIMALRQGGLVMQNYRLIDATLYVTLEPCVMCAGAMIHSRIGRVVFGARDAKTGAAGSLMDVLHHPGMNHRVEITEGILADECAALLSDFFRMRRQEIKAQKKAQSSTDSGGSSGGSSGSETPGTSESATPESSGGSSGGSSEVEFSHEYWMRHALTLAKRARDEREVPVGAVLVLNNRVIGEGWNRAIGLHDPTAHAEIMALRQGGLVMQNYRLIDATLYVTFEPCVMCAGAMIHSRIGRVVFGVRNAKTGAAGSLMDVLHYPGMNHRVEITEGILADECAALLCYFFRMPRQVFNAQKKAQSSTDSGGSSGGSSGSETPGTSESATPESSGGSSGGSDKKYSIGLAIGTNSVGWAVITDEYKVPSKKFKVLGNTDRHSIKKNLIGALLFDSGETAEATRLKRTARRRYTRRKNRICYLQEIFSNEMAKVDDSFFHRLEESFLVEEDKKHERHPIFGNIVDEVAYHEKYPTIYHLRKKLVDSTDKADLRLIYLALAHMIKFRGHFLIEGDLNPDNSDVDKLFIQLVQTYNQLFEENPINASGVDAKAILSARLSKSRRLENLIAQLPGEKKNGLFGNLIALSLGLTPNFKSNFDLAEDAKLQLSKDTYDDDLDNLLAQIGDQYADLFLAAKNLSDAILLSDILRVNTEITKAPLSASMIKRYDEHHQDLTLLKALVRQQLPEKYKEIFFDQSKNGYAGYIDGGASQEEFYKFIKPILEKMDGTEELLVKLNREDLLRKQRTFDNGSIPHQIHLGELHAILRRQEDFYPFLKDNREKIEKILTFRIPYYVGPLARGNSRFAWMTRKSEETITPWNFEEVVDKGASAQSFIERMTNFDKNLPNEKVLPKHSLLYEYFTVYNELTKVKYVTEGMRKPAFLSGEQKKAIVDLLFKTNRKVTVKQLKEDYFKKIECFDSVEISGVEDRFNASLGTYHDLLKIIKDKDFLDNEENEDILEDIVLTLTLFEDREMIEERLKTYAHLFDDKVMKQLKRRRYTGWGRLSRKLINGIRDKQSGKTILDFLKSDGFANRNFMQLIHDDSLTFKEDIQKAQVSGQGDSLHEHIANLAGSPAIKKGILQTVKVVDELVKVMGRHKPENIVIEMARENQTTQKGQKNSRERMKRIEEGIKELGSQILKEHPVENTQLQNEKLYLYYLQNGRDMYVDQELDINRLSDYDVDHIVPQSFLKDDSIDNKVLTRSDKNRGKSDNVPSEEVVKKMKNYWRQLLNAKLITQRKFDNLTKAERGGLSELDKAGFIKRQLVETRQITKHVAQILDSRMNTKYDENDKLIREVKVITLKSKLVSDFRKDFQFYKVREINNYHHAHDAYLNAVVGTALIKKYPKLESEFVYGDYKVYDVRKMIAKSEQEIGKATAKYFFYSNIMNFFKTEITLANGEIRKRPLIETNGETGEIVWDKGRDFATVRKVLSMPQVNIVKKTEVQTGGFSKESILPKRNSDKLIARKKDWDPKKYGGFDSPTVAYSVLVVAKVEKGKSKKLKSVKELLGITIMERSSFEKNPIDFLEAKGYKEVKKDLIIKLPKYSLFELENGRKRMLASAGELQKGNELALPSKYVNFLYLASHYEKLKGSPEDNEQKQLFVEQHKHYLDEIIEQISEFSKRVILADANLDKVLSAYNKHRDKPIREQAENIIHLFTLTNLGAPAAFKYFDTTIDRKRYTSTKEVLDATLIHQSITGLYETRIDLSQLGGDSGGSPKKKRKV

SEQ ID NO: 140 - protein, 1803 aa, Artificial Sequence
  Description of Artificial Sequence: Synthetic polypeptide
MKRTADGSEFESPKKKRKVSEVEFSHEYWMRHALTLAKRAWDEREVPVGAVLVHNNRVIGEGWNRPIGRHDPTAHAEIMALRQGGLVMQNYRLIDATLYVTLEPCVMCAGAMIHSRIGRVVFGARDAKTGAAGSLMDVLHHPGMNHRVEITEGILADECAALLSDFFRMRRQEIKAQKKAQSSTDSGGSSGGSSGSETPGTSESATPESSGGSSGGSSEVEFSHEYWMRHALTLAKRARDEREVPVGAVLVLNNRVIGEGWNRAIGLHDPTAHAEIMALRQGGLVMQNYRLIDATLYVTFEPCVMCAGAMIHSRIGRVVFGVRNAKTGAAGSLMDVLHYPGMNHRVEITEGILADECAALLCYFFRMPRQVFNAQKKAQSSTDSGGSSGGSSGSETPGTSESATPESSGGSSGGSDKKYSIGLAIGTNSVGWAVITDEYKVPSKKFKVLGNTDRHSIKKNLIGALLFDSGETAEATRLKRTARRRYTRRKNRICYLQEIFSNEMAKVDDSFFHRLEESFLVEEDKKHERHPIFGNIVDEVAYHEKYPTIYHLRKKLVDSTDKADLRLIYLALAHMIKFRGHFLIEGDLNPDNSDVDKLFIQLVQTYNQLFEENPINASGVDAKAILSARLSKSRRLENLIAQLPGEKKNGLFGNLIALSLGLTPNFKSNFDLAEDAKLQLSKDTYDDDLDNLLAQIGDQYADLFLAAKNLSDAILLSDILRVNTEITKAPLSASMIKRYDEHHQDLTLLKALVRQQLPEKYKEIFFDQSKNGYAGYIDGGASQEEFYKFIKPILEKMDGTEELLVKLNREDLLRKQRTFDNGSIPHQIHLGELHAILRRQEDFYPFLKDNREKIEKILTFRIPYYVGPLARGNSRFAWMTRKSEETITPWNFEEVVDKGASAQSFIERMTNFDKNLPNEKVLPKHSLLYEYFTVYNELTKVKYVTEGMRKPAFLSGEQKKAIVDLLFKTNRKVTVKQLKEDYFKKIECFDSVEISGVEDRFNASLGTYHDLLKIIKDKDFLDNEENEDILEDIVLTLTLFEDREMIEERLKTYAHLFDDKVMKQLKRRRYTGWGRLSRKLINGIRDKQSGKTILDFLKSDGFANRNFMQLIHDDSLTFKEDIQKAQVSGQGDSLHEHIANLAGSPAIKKGILQTVKVVDELVKVMGRHKPENIVIEMARENQTTQKGQKNSRERMKRIEEGIKELGSQILKEHPVENTQLQNEKLYLYYLQNGRDMYVDQELDINRLSDYDVDHIVPQSFLKDDSIDNKVLTRSDKNRGKSDNVPSEEVVKKMKNYWRQLLNAKLITQRKFDNLTKAERGGLSELDKAGFIKRQLVETRQITKHVAQILDSRMNTKYDENDKLIREVKVITLKSKLVSDFRKDFQFYKVREINNYHHAHDAYLNAVVGTALIKKYPKLESEFVYGDYKVYDVRKMIAKSEQEIGKATAKYFFYSNIMNFFKTEITLANGEIRKRPLIETNGETGEIVWDKGRDFATVRKVLSMPQVNIVKKTEVQTGGFSKESILPKRNSDKLIARKKDWDPKKYGGFDSPTVAYSVLVVAKVEKGKSKKLKSVKELLGITIMERSSFEKNPIDFLEAKGYKEVKKDLIIKLPKYSLFELENGRKRMLASAGELQKGNELALPSKYVNFLYLASHYEKLKGSPEDNEQKQLFVEQHKHYLDEIIEQISEFSKRVILADANLDKVLSAYNKHRDKPIREQAENIIHLFTLTNLGAPAAFKYFDTTIDRKRYTSTKEVLDATLIHQSITGLYETRIDLSQLGGDSGGSKRTADGSEFEPKKKRKV

SEQ ID NO: 141 - protein, 2116 aa, Artificial Sequence
  Description of Artificial Sequence: Synthetic polypeptide
MKRTADGSEFESPKKKRKVSEVEFSHEYWMRHALTLAKRARDEREVPVGAVLVLNNRVIGEGWNRAIGLHDPTAHAEIMALRQGGLVMQNYRLIDATLYGTFEPCVMCAGAMIHSRIGRVVFGVRNAKTGAAGSLMDVLHYPGMNHRVEITEGILADECAALLCYFFRMPRQVFNAQKKAQSSTDSGGSSGGSSGSETPGTSESATPESSGGSSGGSDKKYSIGLAIGTNSVGWAVITDEYKVPSKKFKVLGNTDRHSIKKNLIGALLFDSGETAEATRLKRTARRRYTRRKNRICYLQEIFSNEMAKVDDSFFHRLEESFLVEEDKKHERHPIFGNIVDEVAYHEKYPTIYHLRKKLVDSTDKADLRLIYLALAHMIKFRGHFLIEGDLNPDNSDVDKLFIQLVQTYNQLFEENPINASGVDAKAILSARLSKSRRLENLIAQLPGEKKNGLFGNLIALSLGLTPNFKSNFDLAEDAKLQLSKDTYDDDLDNLLAQIGDQYADLFLAAKNLSDAILLSDILRVNTEITKAPLSASMIKRYDEHHQDLTLLKALVRQQLPEKYKEIFFDQSKNGYAGYIDGGASQEEFYKFIKPILEKMDGTEELLVKLNREDLLRKQRTFDNGSIPHQIHLGELHAILRRQEDFYPFLKDNREKIEKILTFRIPYYVGPLARGNSRFAWMTRKSEETITPWNFEEVVDKGASAQSFIERMTNFDKNLPNEKVLPKHSLLYEYFTVYNELTKVKYVTEGMRKPAFLSGEQKKAIVDLLFKTNRKVTVKQLKEDYFKKIECFDSVEISGVEDRFNASLGTYHDLLKIIKDKDFLDNEENEDILEDIVLTLTLFEDREMIEERLKTYAHLFDDKVMKQLKRRRYTGWGRLSRKLINGIRDKQSGKTILDFLKSDGFANRNFMQLIHDDSLTFKEDIQKAQVSGQGDSLHEHIANLAGSPAIKKGILQTVKVVDELVKVMGRHKPENIVIEMARENQTTQKGQKNSRERMKRIEEGIKELGSQILKEHPVENTQLQNEKLYLYYLQNGRDMYVDQELDINRLSDYDVDHIVPQSFLKDDSIDNKVLTRSDKNRGKSDNVPSEEVVKKMKNYWRQLLNAKLITQRKFDNLTKAERGGLSELDKAGFIKRQLVETRQITKHVAQILDSRMNTKYDENDKLIREVKVITLKSKLVSDFRKDFQFYKVREINNYHHAHDAYLNAVVGTALIKKYPKLESEFVYGDYKVYDVRKMIAKSEQEIGKATAKYFFYSNIMNFFKTEITLANGEIRKRPLIETNGETGEIVWDKGRDFATVRKVLSMPQVNIVKKTEVQTGGFSKESILPKRNSDKLIARKKDWDPKKYGGFDSPTVAYSVLVVAKVEKGKSKKLKSVKELLGITIMERSSFEKNPIDFLEAKGYKEVKKDLIIKLPKYSLFELENGRKRMLASAGELQKGNELALPSKYVNFLYLASHYEKLKGSPEDNEQKQLFVEQHKHYLDEIIEQISEFSKRVILADANLDKVLSAYNKHRDKPIREQAENIIHLFTLTNLGAPAAFKYFDTTIDRKRYTSTKEVLDATLIHQSITGLYETRIDLSQLGGDSGGSKRTADGSEFEPKKKRKVSGGSSGGSSGSETPGTSESATPESSGGSSGGSTDAEYVRIHEKLDIYTFKKQFFNNKKSVSHRCYVLFELKRRGERRACFWGYAVNKPQSGTERGIHAEIFSIRKVEEYLRDNPGQFTINWYSSWSPCADCAEKILEWYNQELRGNGHTLKIWACKLYYEKNARNQIGLWNLRDNGVGLNVMVSEHYQCCRKIFIQSSHNQLNENRWLEKTLKRAEKWRSELSIMIQVKILHTTKSPAVGSGATNFSLLKQAGDVEENPGPMVSKGEELFTGVVPILVELDGDVNGHKFSVSGEGEGDATYGKLTLKFICTTGKLPVPWPTLVTTLTYGVQCFSRYPDHMKQHDFFKSAMPEGYVQERTIFFKDDGNYKTRAEVKFEGDTLVNRIELKGIDFKEDGNILGHKLEYNYNSHNVYIMADKQKNGIKVNFKIRHNIEDGSVQLADHYQQNTPIGDGPVLLPDNHYLSTQSALSKDPNEKRDHMVLLEFVTAAGITLGMDELYKSGGSPKKKRKV

SEQ ID NO: 142 - protein, 2302 aa, Artificial Sequence
  Description of Artificial Sequence: Synthetic polypeptide
MKRTADGSEFESPKKKRKVSEVEFSHEYWMRHALTLAKRARDEREVPVGAVLVLNNRVIGEGWNRAIGLHDPTAHAEIMALRQGGLVMQNYRLIDATLYGTFEPCVMCAGAMIHSRIGRVVFGVRNAKTGAAGSLMDVLHYPGMNHRVEITEGILADECAALLCYFFRMPRQVFNAQKKAQSSTDSGGSSGGSSGSETPGTSESATPESSGGSSGGSDKKYSIGLAIGTNSVGWAVITDEYKVPSKKFKVLGNTDRHSIKKNLIGALLFDSGETAEATRLKRTARRRYTRRKNRICYLQEIFSNEMAKVDDSFFHRLEESFLVEEDKKHERHPIFGNIVDEVAYHEKYPTIYHLRKKLVDSTDKADLRLIYLALAHMIKFRGHFLIEGDLNPDNSDVDKLFIQLVQTYNQLFEENPINASGVDAKAILSARLSKSRRLENLIAQLPGEKKNGLFGNLIALSLGLTPNFKSNFDLAEDAKLQLSKDTYDDDLDNLLAQIGDQYADLFLAAKNLSDAILLSDILRVNTEITKAPLSASMIKRYDEHHQDLTLLKALVRQQLPEKYKEIFFDQSKNGYAGYIDGGASQEEFYKFIKPILEKMDGTEELLVKLNREDLLRKQRTFDNGSIPHQIHLGELHAILRRQEDFYPFLKDNREKIEKILTFRIPYYVGPLARGNSRFAWMTRKSEETITPWNFEEVVDKGASAQSFIERMTNFDKNLPNEKVLPKHSLLYEYFTVYNELTKVKYVTEGMRKPAFLSGEQKKAIVDLLFKTNRKVTVKQLKEDYFKKIECFDSVEISGVEDRFNASLGTYHDLLKIIKDKDFLDNEENEDILEDIVLTLTLFEDREMIEERLKTYAHLFDDKVMKQLKRRRYTGWGRLSRKLINGIRDKQSGKTILDFLKSDGFANRNFMQLIHDDSLTFKEDIQKAQVSGQGDSLHEHIANLAGSPAIKKGILQTVKVVDELVKVMGRHKPENIVIEMARENQTTQKGQKNSRERMKRIEEGIKELGSQILKEHPVENTQLQNEKLYLYYLQNGRDMYVDQELDINRLSDYDVDHIVPQSFLKDDSIDNKVLTRSDKNRGKSDNVPSEEVVKKMKNYWRQLLNAKLITQRKFDNLTKAERGGLSELDKAGFIKRQLVETRQITKHVAQILDSRMNTKYDENDKLIREVKVITLKSKLVSDFRKDFQFYKVREINNYHHAHDAYLNAVVGTALIKKYPKLESEFVYGDYKVYDVRKMIAKSEQEIGKATAKYFFYSNIMNFFKTEITLANGEIRKRPLIETNGETGEIVWDKGRDFATVRKVLSMPQVNIVKKTEVQTGGFSKESIRPKRNSDKLIARKKDWDPKKYGGFVSPTVAYSVLVVAKVEKGKSKKLKSVKELLGITIMERSSFEKNPIDFLEAKGYKEVKKDLIIKLPKYSLFELENGRKRMLASARFLQKGNELALPSKYVNFLYLASHYEKLKGSPEDNEQKQLFVEQHKHYLDEIIEQISEFSKRVILADANLDKVLSAYNKHRDKPIREQAENIIHLFTLTNLGAPRAFKYFDTTIDRKVYRSTKEVLDATLIHQSITGLYETRIDLSQLGGDSGGSKRTADGSEFEPKKKRKVSGGSSGGSSGSETPGTSESATPESSGGSSGGSTDAEYVRIHEKLDIYTFKKQFFNNKKSVSHRCYVLFELKRRGERRACFWGYAVNKPQSGTERGIHAEIFSIRKVEEYLRDNPGQFTINWYSSWSPCADCAEKILEWYNQELRGNGHTLKIWACKLYYEKNARNQIGLWNLRDNGVGLNVMVSEHYQCCRKIFIQSSHNQLNENRWLEKTLKRAEKWRSELSIMIQVKILHTTKSPAVSGGSGGSGGSTNLSDIIEKETGKQLVIQESILMLPEEVEEVIGNKPESDILVHTAYDESTDENVMLLTSDAPEYKPWALVIQDSNGENKIKMLSGGSGGSGGSTNLSDIIEKETGKQLVIQESILMLPEEVEEVIGNKPESDILVHTAYDESTDENVMLLTSDAPEYKPWALVIQDSNGENKIKMLGSGATNFSLLKQAGDVEENPGPMVSKGEELFTGVVPILVELDGDVNGHKFSVSGEGEGDATYGKLTLKFICTTGKLPVPWPTLVTTLTYGVQCFSRYPDHMKQHDFFKSAMPEGYVQERTIFFKDDGNYKTRAEVKFEGDTLVNRIELKGIDFKEDGNILGHKLEYNYNSHNVYIMADKQKNGIKVNFKIRHNIEDGSVQLADHYQQNTPIGDGPVLLPDNHYLSTQSALSKDPNEKRDHMVLLEFVTAAGITLGMDELYKSGGSPKKKRKV

SEQ ID NO: 143 - protein, 2302 aa, Artificial Sequence
  Description of Artificial Sequence: Synthetic polypeptide
MKRTADGSEFESPKKKRKVSEVEFSHEYWMRHALTLAKRARDEREVPVGAVLVLNNRVIGEGWNRAIGLHDPTAHAEIMALRQGGLVMQNYRLIDATLYGTFEPCVMCAGAMIHSRIGRVVFGVRNAKTGAAGSLMDVLHYPGMNHRVEITEGILADECAALLCYFFRMPRQVFNAQKKAQSSTDSGGSSGGSSGSETPGTSESATPESSGGSSGGSDKKYSIGLAIGTNSVGWAVITDEYKVPSKKFKVLGNTDRHSIKKNLIGALLFDSGETAEATRLKRTARRRYTRRKNRICYLQEIFSNEMAKVDDSFFHRLEESFLVEEDKKHERHPIFGNIVDEVAYHEKYPTIYHLRKKLVDSTDKADLRLIYLALAHMIKFRGHFLIEGDLNPDNSDVDKLFIQLVQTYNQLFEENPINASGVDAKAILSARLSKSRRLENLIAQLPGEKKNGLFGNLIALSLGLTPNFKSNFDLAEDAKLQLSKDTYDDDLDNLLAQIGDQYADLFLAAKNLSDAILLSDILRVNTEITKAPLSASMIKRYDEHHQDLTLLKALVRQQLPEKYKEIFFDQSKNGYAGYIDGGASQEEFYKFIKPILEKMDGTEELLVKLNREDLLRKQRTFDNGSIPHQIHLGELHAILRRQEDFYPFLKDNREKIEKILTFRIPYYVGPLARGNSRFAWMTRKSEETITPWNFEEVVDKGASAQSFIERMTNFDKNLPNEKVLPKHSLLYEYFTVYNELTKVKYVTEGMRKPAFLSGEQKKAIVDLLFKTNRKVTVKQLKEDYFKKIECFDSVEISGVEDRFNASLGTYHDLLKIIKDKDFLDNEENEDILEDIVLTLTLFEDREMIEERLKTYAHLFDDKVMKQLKRRRYTGWGRLSRKLINGIRDKQSGKTILDFLKSDGFANRNFMQLIHDDSLTFKEDIQKAQVSGQGDSLHEHIANLAGSPAIKKGILQTVKVVDELVKVMGRHKPENIVIEMARENQTTQKGQKNSRERMKRIEEGIKELGSQILKEHPVENTQLQNEKLYLYYLQNGRDMYVDQELDINRLSDYDVDHIVPQSFLKDDSIDNKVLTRSDKNRGKSDNVPSEEVVKKMKNYWRQLLNAKLITQRKFDNLTKAERGGLSELDKAGFIKRQLVETRQITKHVAQILDSRMNTKYDENDKLIREVKVITLKSKLVSDFRKDFQFYKVREINNYHHAHDAYLNAVVGTALIKKYPKLESEFVYGDYKVYDVRKMIAKSEQEIGKATAKYFFYSNIMNFFKTEITLANGEIRKRPLIETNGETGEIVWDKGRDFATVRKVLSMPQVNIVKKTEVQTGGFSKESILPKRNSDKLIARKKDWDPKKYGGFVSPTVAYSVLVVAKVEKGKSKKLKSVKELLGITIMERSSFEKNPIDFLEAKGYKEVKKDLIIKLPKYSLFELENGRKRMLASARELQKGNELALPSKYVNFLYLASHYEKLKGSPEDNEQKQLFVEQHKHYLDEIIEQISEFSKRVILADANLDKVLSAYNKHRDKPIREQAENIIHLFTLTNLGAPAAFKYFDTTIDRKQYRSTKEVLDATLIHQSITGLYETRIDLSQLGGDSGGSKRTADGSEFEPKKKRKVSGGSSGGSSGSETPGTSESATPESSGGSSGGSTDAEYVRIHEKLDIYTFKKQFFNNKKSVSHRCYVLFELKRRGERRACFWGYAVNKPQSGTERGIHAEIFSIRKVEEYLRDNPGQFTINWYSSWSPCADCAEKILEWYNQELRGNGHTLKIWACKLYYEKNARNQIGLWNLRDNGVGLNVMVSEHYQCCRKIFIQSSHNQLNENRWLEKTLKRAEKWRSELSIMIQVKILHTTKSPAVSGGSGGSGGSTNLSDIIEKETGKQLVIQESILMLPEEVEEVIGNKPESDILVHTAYDESTDENVMLLTSDAPEYKPWALVIQDSNGENKIKMLSGGSGGSGGSTNLSDIIEKETGKQLVIQESILMLPEEVEEVIGNKPESDILVHTAYDESTDENVMLLTSDAPEYKPWALVIQDSNGENKIKMLGSGATNFSLLKQAGDVEENPGPMVSKGEELFTGVVPILVELDGDVNGHKFSVSGEGEGDATYGKLTLKFICTTGKLPVPWPTLVTTLTYGVQCFSRYPDHMKQHDFFKSAMPEGYVQERTIFFKDDGNYKTRAEVKFEGDTLVNRIELKGIDFKEDGNILGHKLEYNYNSHNVYIMADKQKNGIKVNFKIRHNIEDGSVQLADHYQQNTPIGDGPVLLPDNHYLSTQSALSKDPNEKRDHMVLLEFVTAAGITLGMDELYKSGGSPKKKRKV

SEQ ID NO: 144 - protein, 2294 aa, Artificial Sequence
  Description of Artificial Sequence: Synthetic polypeptide
MKRTADGSEFESPKKKRKVSEVEFSHEYWMRHALTLAKRARDEREVPVGAVLVLNNRVIGEGWNRAIGLHDPTAHAEIMALRQGGLVMQNYRLIDATLYGTFEPCVMCAGAMIHSRIGRVVFGVRNAKTGAAGSLMDVLHYPGMNHRVEITEGILADECAALLCYFFRMPRQVFNAQKKAQSSTDSGGSSGGSSGSETPGTSESATPESSGGSSGGSDKKYSIGLAIGTNSVGWAVITDEYKVPSKKFKVLGNTDRHSIKKNLIGALLFDSGETAEATRLKRTARRRYTRRKNRICYLQEIFSNEMAKVDDSFFHRLEESFLVEEDKKHERHPIFGNIVDEVAYHEKYPTIYHLRKKLVDSTDKADLRLIYLALAHMIKFRGHFLIEGDLNPDNSDVDKLFIQLVQTYNQLFEENPINASGVDAKAILSARLSKSRRLENLIAQLPGEKKNGLFGNLIALSLGLTPNFKSNFDLAEDAKLQLSKDTYDDDLDNLLAQIGDQYADLFLAAKNLSDAILLSDILRVNTEITKAPLSASMIKRYDEHHQDLTLLKALVRQQLPEKYKEIFFDQSKNGYAGYIDGGASQEEFYKFIKPILEKMDGTEELLVKLNREDLLRKQRTFDNGSIPHQIHLGELHAILRRQEDFYPFLKDNREKIEKILTFRIPYYVGPLARGNSRFAWMTRKSEETITPWNFEEVVDKGASAQSFIERMTNFDKNLPNEKVLPKHSLLYEYFTVYNELTKVKYVTEGMRKPAFLSGEQKKAIVDLLFKTNRKVTVKQLKEDYFKKIECFDSVEISGVEDRFNASLGTYHDLLKIIKDKDFLDNEENEDILEDIVLTLTLFEDREMIEERLKTYAHLFDDKVMKQLKRRRYTGWGRLSRKLINGIRDKQSGKTILDFLKSDGFANRNFMQLIHDDSLTFKEDIQKAQVSGQGDSLHEHIANLAGSPAIKKGILQTVKVVDELVKVMGRHKPENIVIEMARENQTTQKGQKNSRERMKRIEEGIKELGSQILKEHPVENTQLQNEKLYLYYLQNGRDMYVDQELDINRLSDYDVDHIVPQSFLKDDSIDNKVLTRSDKNRGKSDNVPSEEVVKKMKNYWRQLLNAKLITQRKFDNLTKAERGGLSELDKAGFIKRQLVETRQITKHVAQILDSRMNTKYDENDKLIREVKVITLKSKLVSDFRKDFQFYKVREINNYHHAHDAYLNAVVGTALIKKYPKLESEFVYGDYKVYDVRKMIAKSEQEIGKATAKYFFYSNIMNFFKTEITLANGEIRKRPLIETNGETGEIVWDKGRDFATVRKVLSMPQVNIVKKTEIQTVGQNGGLFDDNPKSPLEVTPSKLVPLKKELNPKKYGGYQKPTTAYPVLLITDTKQLIPISVMNKKQFEQNPVKFLRDRGYQQVGKNDFIKLPKYTLVDIGDGIKRLWASSKEIHKGNQLVVSKKSQILLYHAHHLDSDLSNDYLQNHNQQFDVLFNEIISFSKKCKLGKEHIQKIENVYSNKKNSASIEELAESFIKLLGFTQLGATSPFNFLGVKLNQKQYKGKKDYILPCTEGTLIRQSITGLYETRVDLSKIGEDSGGSKRTADGSEFEPKKKRKVSGGSSGGSSGSETPGTSESATPESSGGSSGGSTDAEYVRIHEKLDIYTFKKQFFNNKKSVSHRCYVLFELKRRGERRACFWGYAVNKPQSGTERGIHAEIFSIRKVEEYLRDNPGQFTINWYSSWSPCADCAEKILEWYNQELRGNGHTLKIWACKLYYEKNARNQIGLWNLRDNGVGLNVMVSEHYQCCRKIFIQSSHNQLNENRWLEKTLKRAEKWRSELSIMIQVKILHTTKSPAVSGGSGGSGGSTNLSDIIEKETGKQLVIQESILMLPEEVEEVIGNKPESDILVHTAYDESTDENVMLLTSDAPEYKPWALVIQDSNGENKIKMLSGGSGGSGGSTNLSDIIEKETGKQLVIQESILMLPEEVEEVIGNKPESDILVHTAYDESTDENVMLLTSDAPEYKPWALVIQDSNGENKIKMLGSGATNFSLLKQAGDVEENPGPMVSKGEELFTGVVPILVELDGDVNGHKFSVSGEGEGDATYGKLTLKFICTTGKLPVPWPTLVTTLTYGVQCFSRYPDHMKQHDFFKSAMPEGYVQERTIFFKDDGNYKTRAEVKFEGDTLVNRIELKGIDFKEDGNILGHKLEYNYNSHNVYIMADKQKNGIKVNFKIRHNIEDGSVQLADHYQQNTPIGDGPVLLPDNHYLSTQSALSKDPNEKRDHMVLLEFVTAAGITLGMDELYKSGGSPKKKRKV

SEQ ID NO: 145 - DNA, 104 bp, Artificial Sequence
  Description of Artificial Sequence: Synthetic polynucleotide
  modified_base (1)..(20): a, c, t, g, unknown or other
nnnnnnnnnnnnnnnnnnnncgttttagagctagaaatagcaagttaaaataaggctagtccgttatcaacttgaaaaagtggcaccgagtcggtgcttttttt

SEQ ID NO: 146 - protein, 2301 aa, Artificial Sequence
  Description of Artificial Sequence: Synthetic polypeptide
MKRTADGSEFESPKKKRKVSEVEFSHEYWMRHALTLAKRARDEREVPVGAVLVLNNRVIGEGWNRAIGLHDPTAHAEIMALRQGGLVMQNYRLIDATLYGTFEPCVMCAGAMIHSRIGRVVFGVRNAKTGAAGSLMDVLHYPGMNHRVEITEGILADECAALLCYFFRMPRQVFNAQKKAQSSTDSGGSSGGSSGSETPGTSESATPESSGGSSGGSDKKYSIGLAIGTNSVGWAVITDEYKVPSKKFKVLGNTDRHSIKKNLIGALLFDSGETAEATRLKRTARRRYTRRKNRICYLQEIFSNEMAKVDDSFFHRLEESFLVEEDKKHERHPIFGNIVDEVAYHEKYPTIYHLRKKLVDSTDKADLRLIYLALAHMIKFRGHFLIEGDLNPDNSDVDKLFIQLVQTYNQLFEENPINASGVDAKAILSARLSKSRRLENLIAQLPGEKKNGLFGNLIALSLGLTPNFKSNFDLAEDAKLQLSKDTYDDDLDNLLAQIGDQYADLFLAAKNLSDAILLSDILRVNTEITKAPLSASMIKRYDEHHQDLTLLKALVRQQLPEKYKEIFFDQSKNGYAGYIDGGASQEEFYKFIKPILEKMDGTEELLVKLNREDLLRKQRTFDNGSIPHQIHLGELHAILRRQEDFYPFLKDNREKIEKILTFRIPYYVGPLARGNSRFAWMTRKSEETITPWNFEEVVDKGASAQSFIERMTNFDKNLPNEKVLPKHSLLYEYFTVYNELTKVKYVTEGMRKPAFLSGEQKKAIVDLLFKTNRKVTVKQLKEDYFKKIECFDSVEISGVEDRFNASLGTYHDLLKIIKDKDFLDNEENEDILEDIVLTLTLFEDREMIEERLKTYAHLFDDKVMKQLKRRRYTGWGRLSRKLINGIRDKQSGKTILDFLKSDGFANRNFMQLIHDDSLTFKEDIQKAQVSGQGDSLHEHIANLAGSPAIKKGILQTVKVVDELVKVMGRHKPENIVIEMARENQTTQKGQKNSRERMKRIEEGIKELGSQILKEHPVENTQLQNEKLYLYYLQNGRDMYVDQELDINRLSDYDVDHIVPQSFLKDDSIDNKVLTRSDKNRGKSDNVPSEEVVKKMKNYWRQLLNAKLITQRKFDNLTKAERGGLSELDKAGFIKRQLVETRQITKHVAQILDSRMNTKYDENDKLIREVKVITLKSKLVSDFRKDFQFYKVREINNYHHAHDAYLNAVVGTALIKKYPKLESEFVYGDYKVYDVRKMIAKSEQEIGKATAKYFFYSNIMNFFKTEITLANGEIRKRPLIETNGETGEIVWDKGRDFATVRKVLSMPQVNIVKKTEVQTGGFSKESILPKRNSDKLIARKKDWDPKKYGGFDSPTVAYSVLVVAKVEKGKSKKLKSVKELLGITIMERSSFEKNPIDFLEAKGYKEVKKDLIIKLPKYSLFELENGRKRMLASAGELQKGNELALPSKYVNFLYLASHYEKLKGSPEDNEQKQLFVEQHKHYLDEIIEQISEFSKRVILADANLDKVLSAYNKHRDKPIREQAENIIHLFTLTNLGAPAAFKYFDTTIDRKRYTSTKEVLDATLIHQSITGLYETRIDLSQLGGDSGGSKRTADGSEFEPKKKRKVSGGSSGGSSGSETPGTSESATPESSGGSSGGSTDAEYVRIHEKLDIYTFKKQFFNNKKSVSHRCYVLFELKRRGERRACFWGYAVNKPQSGTERGIHAEIFSIRKVEEYLRDNPGQFTINWYSSWSPCADCAEKILEWYNQELRGNGHTLKIWACKLYYEKNARNQIGLWNLRDNGVGLNVMVSEHYQCCRKIFIQSSHNQLNENRWLEKTLKRAEKWRSELSIMIQVKILHTTKSPAVSGGSGGSGGSTNLSDIIEKETGKQLVIQESILMLPEEVEEVIGNKPESDILVHTAYDESTDENVMLLTSDAPEYKPWALVIQDSNGENKIKMLSGGSGGSGGSTNLSDIIEKETGKQLVIQESILMLPEEVEEVIGNKPESDILVHTAYDESTDENVMLLTSDAPEYKPWALVIQDSNGENKIKMLGSGATNFSLLKQAGDVEENPGPMVSKGEELFTGVVPILVELDGDVNGHKFSVSGEGEGDATYGKLTLKFICTTGKLPVPWPTLVTTLTYGVQCFSRYPDHMKQHDFFKSAMPEGYVQERTIFFKDDGNYKTRAEVKFEGDTLVNRIELKGIDFKEDGNILGHKLEYNYNSHNVYIMADKQKNGIKVNFKIRHNIEDGSVQLADHYQQNTPIGDGPVLLPDNHYLSTQSALSKDPNEKRDHMVLLEFVTAAGITLGMDELYKSGGSPKKKRK

SEQ ID NO: 147 - protein, 2169 aa, Artificial Sequence
  Description of Artificial Sequence: Synthetic polypeptide
MKRTADGSEFESPKKKRKVSSETGPVAVDPTLRRRIEPHEFEVFFDPRELRKETCLLYEINWGGRHSIWRHTSQNTNKHVEVNFIEKFTTERYFCPNTRCSITWFLSWSPCGECSRAITEFLSRYPHVTLFIYIARLYHHADPRNRQGLRDLISSGVTIQIMTEQESGYCWRNFVNYSPSNEAHWPRYPHLWVRLYVLELYCIILGLPPCLNILRRKQPQLTFFTIALQSCHYQRLPPHILWATGLKSGGSSGGSSGSETPGTSESATPESSGGSSGGSDKKYSIGLAIGTNSVGWAVITDEYKVPSKKFKVLGNTDRHSIKKNLIGALLFDSGETAEATRLKRTARRRYTRRKNRICYLQEIFSNEMAKVDDSFFHRLEESFLVEEDKKHERHPIFGNIVDEVAYHEKYPTIYHLRKKLVDSTDKADLRLIYLALAHMIKFRGHFLIEGDLNPDNSDVDKLFIQLVQTYNQLFEENPINASGVDAKAILSARLSKSRRLENLIAQLPGEKKNGLFGNLIALSLGLTPNFKSNFDLAEDAKLQLSKDTYDDDLDNLLAQIGDQYADLFLAAKNLSDAILLSDILRVNTEITKAPLSASMIKRYDEHHQDLTLLKALVRQQLPEKYKEIFFDQSKNGYAGYIDGGASQEEFYKFIKPILEKMDGTEELLVKLNREDLLRKQRTFDNGSIPHQIHLGELHAILRRQEDFYPFLKDNREKIEKILTFRIPYYVGPLARGNSRFAWMTRKSEETITPWNFEEVVDKGASAQSFIERMTNFDKNLPNEKVLPKHSLLYEYFTVYNELTKVKYVTEGMRKPAFLSGEQKKAIVDLLFKTNRKVTVKQLKEDYFKKIECFDSVEISGVEDRFNASLGTYHDLLKIIKDKDFLDNEENEDILEDIVLTLTLFEDREMIEERLKTYAHLFDDKVMKQLKRRRYTGWGRLSRKLINGIRDKQSGKTILDFLKSDGFANRNFMQLIHDDSLTFKEDIQKAQVSGQGDSLHEHIANLAGSPAIKKGILQTVKVVDELVKVMGRHKPENIVIEMARENQTTQKGQKNSRERMKRIEEGIKELGSQILKEHPVENTQLQNEKLYLYYLQNGRDMYVDQELDINRLSDYDVDHIVPQSFLKDDSIDNKVLTRSDKNRGKSDNVPSEEVVKKMKNYWRQLLNAKLITQRKFDNLTKAERGGLSELDKAGFIKRQLVETRQITKHVAQILDSRMNTKYDENDKLIREVKVITLKSKLVSDFRKDFQFYKVREINNYHHAHDAYLNAVVGTALIKKYPKLESEFVYGDYKVYDVRKMIAKSEQEIGKATAKYFFYSNIMNFFKTEITLANGEIRKRPLIETNGETGEIVWDKGRDFATVRKVLSMPQVNIVKKTEVQTGGFSKESILPKRNSDKLIARKKDWDPKKYGGFDSPTVAYSVLVVAKVEKGKSKKLKSVKELLGITIMERSSFEKNPIDFLEAKGYKEVKKDLIIKLPKYSLFELENGRKRMLASAGELQKGNELALPSKYVNFLYLASHYEKLKGSPEDNEQKQLFVEQHKHYLDEIIEQISEFSKRVILADANLDKVLSAYNKHRDKPIREQAENIIHLFTLTNLGAPAAFKYFDTTIDRKRYTSTKEVLDATLIHQSITGLYETRIDLSQLGGDSGGSGGSGGSANELTWHDVLAEEKQQPYFLNTLQTVASERQSGVTIYPPQKDVFNAFRFTELGDVKVVILGQDPYHGPGQAHGLAFSVRPGIAIPPSLLNMYKELENTIPGFTRPNHGYLESWARQGVLLLNTVLTVRAGQAHSHASLGWETFTDKVISLINQHREGVVFLLWGSHAQKKGAIIDKQRHHVLKAPHPSPLSAHRGFFGCNHFVLANQWLEQRGETPIDWMPVLPAESESGGSKRTADGSEFEPKKKRKVGGGGSGATNFSLLKQAGDVEENPGPMVSKGEELFTGVVPILVELDGDVNGHKFSVSGEGEGDATYGKLTLKFICTTGKLPVPWPTLVTTLTYGVQCFSRYPDHMKQHDFFKSAMPEGYVQERTIFFKDDGNYKTRAEVKFEGDTLVNRIELKGIDFKEDGNILGHKLEYNYNSHNVYIMADKQKNGIKVNFKIRHNIEDGSVQLADHYQQNTPIGDGPVLLPDNHYLSTQSALSKDPNEKRDHMVLLEFVTAAGITLGMDELYK

SEQ ID NO: 148 - protein, 2169 aa, Artificial Sequence
  Description of Artificial Sequence: Synthetic polypeptide
MKRTADGSEFESPKKKRKVSSETGPVAVDPTLRRRIEPHEFEVFFDPRELAKETCLLYEINWGGRHSIWRHTSQNTNKHVEVNFIEKFTTERYFCPNTRCSITWFLSWSPCGECSRAITEFLSRYPHVTLFIYIARLYHHADPRNRQGLRDLISSGVTIQIMTEQESGYCWRNFVNYSPSNEAHWPRYPHLWVRLYVLELYCIILGLPPCLNILRRKQPQLTFFTIALQSCHYQRLPPHILWATGLKSGGSSGGSSGSETPGTSESATPESSGGSSGGSDKKYSIGLAIGTNSVGWAVITDEYKVPSKKFKVLGNTDRHSIKKNLIGALLFDSGETAEATRLKRTARRRYTRRKNRICYLQEIFSNEMAKVDDSFFHRLEESFLVEEDKKHERHPIFGNIVDEVAYHEKYPTIYHLRKKLVDSTDKADLRLIYLALAHMIKFRGHFLIEGDLNPDNSDVDKLFIQLVQTYNQLFEENPINASGVDAKAILSARLSKSRRLENLIAQLPGEKKNGLFGNLIALSLGLTPNFKSNFDLAEDAKLQLSKDTYDDDLDNLLAQIGDQYADLFLAAKNLSDAILLSDILRVNTEITKAPLSASMIKRYDEHHQDLTLLKALVRQQLPEKYKEIFFDQSKNGYAGYIDGGASQEEFYKFIKPILEKMDGTEELLVKLNREDLLRKQRTFDNGSIPHQIHLGELHAILRRQEDFYPFLKDNREKIEKILTFRIPYYVGPLARGNSRFAWMTRKSEETITPWNFEEVVDKGASAQSFIERMTNFDKNLPNEKVLPKHSLLYEYFTVYNELTKVKYVTEGMRKPAFLSGEQKKAIVDLLFKTNRKVTVKQLKEDYFKKIECFDSVEISGVEDRFNASLGTYHDLLKIIKDKDFLDNEENEDILEDIVLTLTLFEDREMIEERLKTYAHLFDDKVMKQLKRRRYTGWGRLSRKLINGIRDKQSGKTILDFLKSDGFANRNFMQLIHDDSLTFKEDIQKAQVSGQGDSLHEHIANLAGSPAIKKGILQTVKVVDELVKVMGRHKPENIVIEMARENQTTQKGQKNSRERMKRIEEGIKELGSQILKEHPVENTQLQNEKLYLYYLQNGRDMYVDQELDINRLSDYDVDHIVPQSFLKDDSIDNKVLTRSDKNRGKSDNVPSEEVVKKMKNYWRQLLNAKLITQRKFDNLTKAERGGLSELDKAGFIKRQLVETRQITKHVAQILDSRMNTKYDENDKLIREVKVITLKSKLVSDFRKDFQFYKVREINNYHHAHDAYLNAVVGTALIKKYPKLESEFVYGDYKVYDVRKMIAKSEQEIGKATAKYFFYSNIMNFFKTEITLANGEIRKRPLIETNGETGEIVWDKGRDFATVRKVLSMPQVNIVKKTEVQTGGFSKESILPKRNSDKLIARKKDWDPKKYGGFDSPTVAYSVLVVAKVEKGKSKKLKSVKELLGITIMERSSFEKNPIDFLEAKGYKEVKKDLIIKLPKYSLFELENGRKRMLASAGELQKGNELALPSKYVNFLYLASHYEKLKGSPEDNEQKQLFVEQHKHYLDEIIEQISEFSKRVILADANLDKVLSAYNKHRDKPIREQAENIIHLFTLTNLGAPAAFKYFDTTIDRKRYTSTKEVLDATLIHQSITGLYETRIDLSQLGGDSGGSGGSGGSANELTWHDVLAEEKQQPYFLNTLQTVASERQSGVTIYPPQKDVFNAFRFTELGDVKVVILGQDPYHGPGQAHGLAFSVRPGIAIPPSLLNMYKELENTIPGFTRPNHGYLESWARQGVLLLNTVLTVRAGQAHSHASLGWETFTDKVISLINQHREGVVFLLWGSHAQKKGAIIDKQRHHVLKAPHPSPLSAHRGFFGCNHFVLANQWLEQRGETPIDWMPVLPAESESGGSKRTADGSEFEPKKKRKVGGGGSGATNFSLLKQAGDVEENPGPMVSKGEELFTGVVPILVELDGDVNGHKFSVSGEGEGDATYGKLTLKFICTTGKLPVPWPTLVTTLTYGVQCFSRYPDHMKQHDFFKSAMPEGYVQERTIFFKDDGNYKTRAEVKFEGDTLVNRIELKGIDFKEDGNILGHKLEYNYNSHNVYIMADKQKNGIKVNFKIRHNIEDGSVQLADHYQQNTPIGDGPVLLPDNHYLSTQSALSKDPNEKRDHMVLLEFVTAAGITLGMDELYK

SEQ ID NO: 149 - protein, 2169 aa, Artificial Sequence
  Description of Artificial Sequence: Synthetic polypeptide
MKRTADGSEFESPKKKRKVSSETGPVAVDPTLRRRIEPHEFEVFFDPRELAAETCLLYEINWGGRHSIWRHTSQNTNKHVEVNFIEKFTTERYFCPNTRCSITWFLSWSPCGECSRAITEFLSRYPHVTLFIYIARLYHHADPRNRQGLRDLISSGVTIQIMTEQESGYCWRNFVNYSPSNEAHWPRYPHLWVRLYVLELYCIILGLPPCLNILRRKQPQLTFFTIALQSCHYQRLPPHILWATGLKSGGSSGGSSGSETPGTSESATPESSGGSSGGSDKKYSIGLAIGTNSVGWAVITDEYKVPSKKFKVLGNTDRHSIKKNLIGALLFDSGETAEATRLKRTARRRYTRRKNRICYLQEIFSNEMAKVDDSFFHRLEESFLVEEDKKHERHPIFGNIVDEVAYHEKYPTIYHLRKKLVDSTDKADLRLIYLALAHMIKFRGHFLIEGDLNPDNSDVDKLFIQLVQTYNQLFEENPINASGVDAKAILSARLSKSRRLENLIAQLPGEKKNGLFGNLIALSLGLTPNFKSNFDLAEDAKLQLSKDTYDDDLDNLLAQIGDQYADLFLAAKNLSDAILLSDILRVNTEITKAPLSASMIKRYDEHHQDLTLLKALVRQQLPEKYKEIFFDQSKNGYAGYIDGGASQEEFYKFIKPILEKMDGTEELLVKLNREDLLRKQRTFDNGSIPHQIHLGELHAILRRQEDFYPFLKDNREKIEKILTFRIPYYVGPLARGNSRFAWMTRKSEETITPWNFEEVVDKGASAQSFIERMTNFDKNLPNEKVLPKHSLLYEYFTVYNELTKVKYVTEGMRKPAFLSGEQKKAIVDLLFKTNRKVTVKQLKEDYFKKIECFDSVEISGVEDRFNASLGTYHDLLKIIKDKDFLDNEENEDILEDIVLTLTLFEDREMIEERLKTYAHLFDDKVMKQLKRRRYTGWGRLSRKLINGIRDKQSGKTILDFLKSDGFANRNFMQLIHDDSLTFKEDIQKAQVSGQGDSLHEHIANLAGSPAIKKGILQTVKVVDELVKVMGRHKPENIVIEMARENQTTQKGQKNSRERMKRIEEGIKELGSQILKEHPVENTQLQNEKLYLYYLQNGRDMYVDQELDINRLSDYDVDHIVPQSFLKDDSIDNKVLTRSDKNRGKSDNVPSEEVVKKMKNYWRQLLNAKLITQRKFDNLTKAERGGLSELDKAGFIKRQLVETRQITKHVAQILDSRMNTKYDENDKLIREVKVITLKSKLVSDFRKDFQFYKVREINNYHHAHDAYLNAVVGTALIKKYPKLESEFVYGDYKVYDVRKMIAKSEQEIGKATAKYFFYSNIMNFFKTEITLANGEIRKRPLIETNGETGEIVWDKGRDFATVRKVLSMPQVNIVKKTEVQTGGFSKESILPKRNSDKLIARKKDWDPKKYGGFDSPTVAYSVLVVAKVEKGKSKKLKSVKELLGITIMERSSFEKNPIDFLEAKGYKEVKKDLIIKLPKYSLFELENGRKRMLASAGELQKGNELALPSKYVNFLYLASHYEKLKGSPEDNEQKQLFVEQHKHYLDEIIEQISEFSKRVILADANLDKVLSAYNKHRDKPIREQAENIIHLFTLTNLGAPAAFKYFDTTIDRKRYTSTKEVLDATLIHQSITGLYETRIDLSQLGGDSGGSGGSGGSANELTWHDVLAEEKQQPYFLNTLQTVASERQSGVTIYPPQKDVFNAFRFTELGDVKVVILGQDPYHGPGQAHGLAFSVRPGIAIPPSLLNMYKELENTIPGFTRPNHGYLESWARQGVLLLNTVLTVRAGQAHSHASLGWETFTDKVISLINQHREGVVFLLWGSHAQKKGAIIDKQRHHVLKAPHPSPLSAHRGFFGCNHFVLANQWLEQRGETPIDWMPVLPAESESGGSKRTADGSEFEPKKKRKVGGGGSGATNFSLLKQAGDVEENPGPMVSKGEELFTGVVPILVELDGDVNGHKFSVSGEGEGDATYGKLTLKFICTTGKLPVPWPTLVTTLTYGVQCFSRYPDHMKQHDFFKSAMPEGYVQERTIFFKDDGNYKTRAEVKFEGDTLVNRIELKGIDFKEDGNILGHKLEYNYNSHNVYIMADKQKNGIKVNFKIRHNIEDGSVQLADHYQQNTPIGDGPVLLPDNHYLSTQSALSKDPNEKRDHMVLLEFVTAAGITLGMDELYK

SEQ ID NO: 150 - protein, 1941 aa, Artificial Sequence
  Description of Artificial Sequence: Synthetic polypeptide
MKRTADGSEFESPKKKRKVSGGSSGGSSGSETPGTSESATPESSGGSSGGSDKKYSIGLAIGTNSVGWAVITDEYKVPSKKFKVLGNTDRHSIKKNLIGALLFDSGETAEATRLKRTARRRYTRRKNRICYLQEIFSNEMAKVDDSFFHRLEESFLVEEDKKHERHPIFGNIVDEVAYHEKYPTIYHLRKKLVDSTDKADLRLIYLALAHMIKFRGHFLIEGDLNPDNSDVDKLFIQLVQTYNQLFEENPINASGVDAKAILSARLSKSRRLENLIAQLPGEKKNGLFGNLIALSLGLTPNFKSNFDLAEDAKLQLSKDTYDDDLDNLLAQIGDQYADLFLAAKNLSDAILLSDILRVNTEITKAPLSASMIKRYDEHHQDLTLLKALVRQQLPEKYKEIFFDQSKNGYAGYIDGGASQEEFYKFIKPILEKMDGTEELLVKLNREDLLRKQRTFDNGSIPHQIHLGELHAILRRQEDFYPFLKDNREKIEKILTFRIPYYVGPLARGNSRFAWMTRKSEETITPWNFEEVVDKGASAQSFIERMTNFDKNLPNEKVLPKHSLLYEYFTVYNELTKVKYVTEGMRKPAFLSGEQKKAIVDLLFKTNRKVTVKQLKEDYFKKIECFDSVEISGVEDRFNASLGTYHDLLKIIKDKDFLDNEENEDILEDIVLTLTLFEDREMIEERLKTYAHLFDDKVMKQLKRRRYTGWGRLSRKLINGIRDKQSGKTILDFLKSDGFANRNFMQLIHDDSLTFKEDIQKAQVSGQGDSLHEHIANLAGSPAIKKGILQTVKVVDELVKVMGRHKPENIVIEMARENQTTQKGQKNSRERMKRIEEGIKELGSQILKEHPVENTQLQNEKLYLYYLQNGRDMYVDQELDINRLSDYDVDHIVPQSFLKDDSIDNKVLTRSDKNRGKSDNVPSEEVVKKMKNYWRQLLNAKLITQRKFDNLTKAERGGLSELDKAGFIKRQLVETRQITKHVAQILDSRMNTKYDENDKLIREVKVITLKSKLVSDFRKDFQFYKVREINNYHHAHDAYLNAVVGTALIKKYPKLESEFVYGDYKVYDVRKMIAKSEQEIGKATAKYFFYSNIMNFFKTEITLANGEIRKRPLIETNGETGEIVWDKGRDFATVRKVLSMPQVNIVKKTEVQTGGFSKESILPKRNSDKLIARKKDWDPKKYGGFDSPTVAYSVLVVAKVEKGKSKKLKSVKELLGITIMERSSFEKNPIDFLEAKGYKEVKKDLIIKLPKYSLFELENGRKRMLASAGELQKGNELALPSKYVNFLYLASHYEKLKGSPEDNEQKQLFVEQHKHYLDEIIEQISEFSKRVILADANLDKVLSAYNKHRDKPIREQAENIIHLFTLTNLGAPAAFKYFDTTIDRKRYTSTKEVLDATLIHQSITGLYETRIDLSQLGGDSGGSGGSGGSANELTWHDVLAEEKQQPYFLNTLQTVASERQSGVTIYPPQKDVFNAFRFTELGDVKVVILGQDPYHGPGQAHGLAFSVRPGIAIPPSLLNMYKELENTIPGFTRPNHGYLESWARQGVLLLNTVLTVRAGQAHSHASLGWETFTDKVISLINQHREGVVFLLWGSHAQKKGAIIDKQRHHVLKAPHPSPLSAHRGFFGCNHFVLANQWLEQRGETPIDWMPVLPAESESGGSKRTADGSEFEPKKKRKVGGGGSGATNFSLLKQAGDVEENPGPMVSKGEELFTGVVPILVELDGDVNGHKFSVSGEGEGDATYGKLTLKFICTTGKLPVPWPTLVTTLTYGVQCFSRYPDHMKQHDFFKSAMPEGYVQERTIFFKDDGNYKTRAEVKFEGDTLVNRIELKGIDFKEDGNILGHKLEYNYNSHNVYIMADKQKNGIKVNFKIRHNIEDGSVQLADHYQQNTPIGDGPVLLPDNHYLSTQSALSKDPNEKRDHMVLLEFVTAAGITLGMDELYK

SEQ ID NO: 151 - protein, 2169 aa, Artificial Sequence
  Description of Artificial Sequence: Synthetic polypeptide
MKRTADGSEFESPKKKRKVANELTWHDVLAEEKQQPYFLNTLQTVASERQSGVTIYPPQKDVFNAFRFTELGDVKVVILGQDPYHGPGQAHGLAFSVRPGIAIPPSLLNMYKELENTIPGFTRPNHGYLESWARQGVLLLNTVLTVRAGQAHSHASLGWETFTDKVISLINQHREGVVFLLWGSHAQKKGAIIDKQRHHVLKAPHPSPLSAHRGFFGCNHFVLANQWLEQRGETPIDWMPVLPAESESGGSGGSGGSSSETGPVAVDPTLRRRIEPHEFEVFFDPRELRKETCLLYEINWGGRHSIWRHTSQNTNKHVEVNFIEKFTTERYFCPNTRCSITWFLSWSPCGECSRAITEFLSRYPHVTLFIYIARLYHHADPRNRQGLRDLISSGVTIQIMTEQESGYCWRNFVNYSPSNEAHWPRYPHLWVRLYVLELYCIILGLPPCLNILRRKQPQLTFFTIALQSCHYQRLPPHILWATGLKSGGSSGGSSGSETPGTSESATPESSGGSSGGSDKKYSIGLAIGTNSVGWAVITDEYKVPSKKFKVLGNTDRHSIKKNLIGALLFDSGETAEATRLKRTARRRYTRRKNRICYLQEIFSNEMAKVDDSFFHRLEESFLVEEDKKHERHPIFGNIVDEVAYHEKYPTIYHLRKKLVDSTDKADLRLIYLALAHMIKFRGHFLIEGDLNPDNSDVDKLFIQLVQTYNQLFEENPINASGVDAKAILSARLSKSRRLENLIAQLPGEKKNGLFGNLIALSLGLTPNFKSNFDLAEDAKLQLSKDTYDDDLDNLLAQIGDQYADLFLAAKNLSDAILLSDILRVNTEITKAPLSASMIKRYDEHHQDLTLLKALVRQQLPEKYKEIFFDQSKNGYAGYIDGGASQEEFYKFIKPILEKMDGTEELLVKLNREDLLRKQRTFDNGSIPHQIHLGELHAILRRQEDFYPFLKDNREKIEKILTFRIPYYVGPLARGNSRFAWMTRKSEETITPWNFEEVVDKGASAQSFIERMTNFDKNLPNEKVLPKHSLLYEYFTVYNELTKVKYVTEGMRKPAFLSGEQKKAIVDLLFKTNRKVTVKQLKEDYFKKIECFDSVEISGVEDRFNASLGTYHDLLKIIKDKDFLDNEENEDILEDIVLTLTLFEDREMIEERLKTYAHLFDDKVMKQLKRRRYTGWGRLSRKLINGIRDKQSGKTILDFLKSDGFANRNFMQLIHDDSLTFKEDIQKAQVSGQGDSLHEHIANLAGSPAIKKGILQTVKVVDELVKVMGRHKPENIVIEMARENQTTQKGQKNSRERMKRIEEGIKELGSQILKEHPVENTQLQNEKLYLYYLQNGRDMYVDQELDINRLSDYDVDHIVPQSFLKDDSIDNKVLTRSDKNRGKSDNVPSEEVVKKMKNYWRQLLNAKLITQRKFDNLTKAERGGLSELDKAGFIKRQLVETRQITKHVAQILDSRMNTKYDENDKLIREVKVITLKSKLVSDFRKDFQFYKVREINNYHHAHDAYLNAVVGTALIKKYPKLESEFVYGDYKVYDVRKMIAKSEQEIGKATAKYFFYSNIMNFFKTEITLANGEIRKRPLIETNGETGEIVWDKGRDFATVRKVLSMPQVNIVKKTEVQTGGFSKESILPKRNSDKLIARKKDWDPKKYGGFDSPTVAYSVLVVAKVEKGKSKKLKSVKELLGITIMERSSFEKNPIDFLEAKGYKEVKKDLIIKLPKYSLFELENGRKRMLASAGELQKGNELALPSKYVNFLYLASHYEKLKGSPEDNEQKQLFVEQHKHYLDEIIEQISEFSKRVILADANLDKVLSAYNKHRDKPIREQAENIIHLFTLTNLGAPAAFKYFDTTIDRKRYTSTKEVLDATLIHQSITGLYETRIDLSQLGGDSGGSKRTADGSEFEPKKKRKVGGGGSGATNFSLLKQAGDVEENPGPMVSKGEELFTGVVPILVELDGDVNGHKFSVSGEGEGDATYGKLTLKFICTTGKLPVPWPTLVTTLTYGVQCFSRYPDHMKQHDFFKSAMPEGYVQERTIFFKDDGNYKTRAEVKFEGDTLVNRIELKGIDFKEDGNILGHKLEYNYNSHNVYIMADKQKNGIKVNFKIRHNIEDGSVQLADHYQQNTPIGDGPVLLPDNHYLSTQSALSKDPNEKRDHMVLLEFVTAAGITLGMDELYK

SEQ ID NO: 152 - protein, 2169 aa, Artificial Sequence
  Description of Artificial Sequence: Synthetic polypeptide
MKRTADGSEFESPKKKRKVANELTWHDVLAEEKQQPYFLNTLQTVASERQSGVTIYPPQKDVFNAFRFTELGDVKVVILGQDPYHGPGQAHGLAFSVRPGIAIPPSLLNMYKELENTIPGFTRPNHGYLESWARQGVLLLNTVLTVRAGQAHSHASLGWETFTDKVISLINQHREGVVFLLWGSHAQKKGAIIDKQRHHVLKAPHPSPLSAHRGFFGCNHFVLANQWLEQRGETPIDWMPVLPAESESGGSGGSGGSSSETGPVAVDPTLRRRIEPHEFEVFFDPRELAKETCLLYEINWGGRHSIWRHTSQNTNKHVEVNFIEKFTTERYFCPNTRCSITWFLSWSPCGECSRAITEFLSRYPHVTLFIYIARLYHHADPRNRQGLRDLISSGVTIQIMTEQESGYCWRNFVNYSPSNEAHWPRYPHLWVRLYVLELYCIILGLPPCLNILRRKQPQLTFFTIALQSCHYQRLPPHILWATGLKSGGSSGGSSGSETPGTSESATPESSGGSSGGSDKKYSIGLAIGTNSVGWAVITDEYKVPSKKFKVLGNTDRHSIKKNLIGALLFDSGETAEATRLKRTARRRYTRRKNRICYLQEIFSNEMAKVDDSFFHRLEESFLVEEDKKHERHPIFGNIVDEVAYHEKYPTIYHLRKKLVDSTDKADLRLIYLALAHMIKFRGHFLIEGDLNPDNSDVDKLFIQLVQTYNQLFEENPINASGVDAKAILSARLSKSRRLENLIAQLPGEKKNGLFGNLIALSLGLTPNFKSNFDLAEDAKLQLSKDTYDDDLDNLLAQIGDQYADLFLAAKNLSDAILLSDILRVNTEITKAPLSASMIKRYDEHHQDLTLLKALVRQQLPEKYKEIFFDQSKNGYAGYIDGGASQEEFYKFIKPILEKMDGTEELLVKLNREDLLRKQRTFDNGSIPHQIHLGELHAILRRQEDFYPFLKDNREKIEKILTFRIPYYVGPLARGNSRFAWMTRKSEETITPWNFEEVVDKGASAQSFIERMTNFDKNLPNEKVLPKHSLLYEYFTVYNELTKVKYVTEGMRKPAFLSGEQKKAIVDLLFKTNRKVTVKQLKEDYFKKIECFDSVEISGVEDRFNASLGTYHDLLKIIKDKDFLDNEENEDILEDIVLTLTLFEDREMIEERLKTYAHLFDDKVMKQLKRRRYTGWGRLSRKLINGIRDKQSGKTILDFLKSDGFANRNFMQLIHDDSLTFKEDIQKAQVSGQGDSLHEHIANLAGSPAIKKGILQTVKVVDELVKVMGRHKPENIVIEMARENQTTQKGQKNSRERMKRIEEGIKELGSQILKEHPVENTQLQNEKLYLYYLQNGRDMYVDQELDINRLSDYDVDHIVPQSFLKDDSIDNKVLTRSDKNRGKSDNVPSEEVVKKMKNYWRQLLNAKLITQRKFDNLTKAERGGLSELDKAGFIKRQLVETRQITKHVAQILDSRMNTKYDENDKLIREVKVITLKSKLVSDFRKDFQFYKVREINNYHHAHDAYLNAVVGTALIKKYPKLESEFVYGDYKVYDVRKMIAKSEQEIGKATAKYFFYSNIMNFFKTEITLANGEIRKRPLIETNGETGEIVWDKGRDFATVRKVLSMPQVNIVKKTEVQTGGFSKESILPKRNSDKLIARKKDWDPKKYGGFDSPTVAYSVLVVAKVEKGKSKKLKSVKELLGITIMERSSFEKNPIDFLEAKGYKEVKKDLIIKLPKYSLFELENGRKRMLASAGELQKGNELALPSKYVNFLYLASHYEKLKGSPEDNEQKQLFVEQHKHYLDEIIEQISEFSKRVILADANLDKVLSAYNKHRDKPIREQAENIIHLFTLTNLGAPAAFKYFDTTIDRKRYTSTKEVLDATLIHQSITGLYETRIDLSQLGGDSGGSKRTADGSEFEPKKKRKVGGGGSGATNFSLLKQAGDVEENPGPMVSKGEELFTGVVPILVELDGDVNGHKFSVSGEGEGDATYGKLTLKFICTTGKLPVPWPTLVTTLTYGVQCFSRYPDHMKQHDFFKSAMPEGYVQERTIFFKDDGNYKTRAEVKFEGDTLVNRIELKGIDFKEDGNILGHKLEYNYNSHNVYIMADKQKNGIKVNFKIRHNIEDGSVQLADHYQQNTPIGDGPVLLPDNHYLSTQSALSKDPNEKRDHMVLLEFVTAAGITLGMDELYK

SEQ ID NO: 153 - protein, 2169 aa, Artificial Sequence
  Description of Artificial Sequence: Synthetic polypeptide
MKRTADGSEFESPKKKRKVANELTWHDVLAEEKQQPYFLNTLQTVASERQSGVTIYPPQKDVFNAFRFTELGDVKVVILGQDPYHGPGQAHGLAFSVRPGIAIPPSLLNMYKELENTIPGFTRPNHGYLESWARQGVLLLNTVLTVRAGQAHSHASLGWETFTDKVISLINQHREGVVFLLWGSHAQKKGAIIDKQRHHVLKAPHPSPLSAHRGFFGCNHFVLANQWLEQRGETPIDWMPVLPAESESGGSGGSGGSSSETGPVAVDPTLRRRIEPHEFEVFFDPRELAAETCLLYEINWGGRHSIWRHTSQNTNKHVEVNFIEKFTTERYFCPNTRCSITWFLSWSPCGECSRAITEFLSRYPHVTLFIYIARLYHHADPRNRQGLRDLISSGVTIQIMTEQESGYCWRNFVNYSPSNEAHWPRYPHLWVRLYVLELYCIILGLPPCLNILRRKQPQLTFFTIALQSCHYQRLPPHILWATGLKSGGSSGGSSGSETPGTSESATPESSGGSSGGSDKKYSIGLAIGTNSVGWAVITDEYKVPSKKFKVLGNTDRHSIKKNLIGALLFDSGETAEATRLKRTARRRYTRRKNRICYLQEIFSNEMAKVDDSFFHRLEESFLVEEDKKHERHPIFGNIVDEVAYHEKYPTIYHLRKKLVDSTDKADLRLIYLALAHMIKFRGHFLIEGDLNPDNSDVDKLFIQLVQTYNQLFEENPINASGVDAKAILSARLSKSRRLENLIAQLPGEKKNGLFGNLIALSLGLTPNFKSNFDLAEDAKLQLSKDTYDDDLDNLLAQIGDQYADLFLAAKNLSDAILLSDILRVNTEITKAPLSASMIKRYDEHHQDLTLLKALVRQQLPEKYKEIFFDQSKNGYAGYIDGGASQEEFYKFIKPILEKMDGTEELLVKLNREDLLRKQRTFDNGSIPHQIHLGELHAILRRQEDFYPFLKDNREKIEKILTFRIPYYVGPLARGNSRFAWMTRKSEETITPWNFEEVVDKGASAQSFIERMTNFDKNLPNEKVLPKHSLLYEYFTVYNELTKVKYVTEGMRKPAFLSGEQKKAIVDLLFKTNRKVTVKQLKEDYFKKIECFDSVEISGVEDRFNASLGTYHDLLKIIKDKDFLDNEENEDILEDIVLTLTLFEDREMIEERLKTYAHLFDDKVMKQLKRRRYTGWGRLSRKLINGIRDKQSGKTILDFLKSDGFANRNFMQLIHDDSLTFKEDIQKAQVSGQGDSLHEHIANLAGSPAIKKGILQTVKVVDELVKVMGRHKPENIVIEMARENQTTQKGQKNSRERMKRIEEGIKELGSQILKEHPVENTQLQNEKLYLYYLQNGRDMYVDQELDINRLSDYDVDHIVPQSFLKDDSIDNKVLTRSDKNRGKSDNVPSEEVVKKMKNYWRQLLNAKLITQRKFDNLTKAERGGLSELDKAGFIKRQLVETRQITKHVAQILDSRMNTKYDENDKLIREVKVITLKSKLVSDFRKDFQFYKVREINNYHHAHDAYLNAVVGTALIKKYPKLESEFVYGDYKVYDVRKMIAKSEQEIGKATAKYFFYSNIMNFFKTEITLANGEIRKRPLIETNGETGEIVWDKGRDFATVRKVLSMPQVNIVKKTEVQTGGFSKESILPKRNSDKLIARKKDWDPKKYGGFDSPTVAYSVLVVAKVEKGKSKKLKSVKELLGITIMERSSFEKNPIDFLEAKGYKEVKKDLIIKLPKYSLFELENGRKRMLASAGELQKGNELALPSKYVNFLYLASHYEKLKGSPEDNEQKQLFVEQHKHYLDEIIEQISEFSKRVILADANLDKVLSAYNKHRDKPIREQAENIIHLFTLTNLGAPAAFKYFDTTIDRKRYTSTKEVLDATLIHQSITGLYETRIDLSQLGGDSGGSKRTADGSEFEPKKKRKVGGGGSGATNFSLLKQAGDVEENPGPMVSKGEELFTGVVPILVELDGDVNGHKFSVSGEGEGDATYGKLTLKFICTTGKLPVPWPTLVTTLTYGVQCFSRYPDHMKQHDFFKSAMPEGYVQERTIFFKDDGNYKTRAEVKFEGDTLVNRIELKGIDFKEDGNILGHKLEYNYNSHNVYIMADKQKNGIKVNFKIRHNIEDGSVQLADHYQQNTPIGDGPVLLPDNHYLSTQSALSKDPNEKRDHMVLLEFVTAAGITLGMDELYK

SEQ ID NO: 154 - protein, 1941 aa, Artificial Sequence
  Description of Artificial Sequence: Synthetic polypeptide
MKRTADGSEFESPKKKRKVANELTWHDVLAEEKQQPYFLNTLQTVASERQSGVTIYPPQKDVFNAFRFTELGDVKVVILGQDPYHGPGQAHGLAFSVRPGIAIPPSLLNMYKELENTIPGFTRPNHGYLESWARQGVLLLNTVLTVRAGQAHSHASLGWETFTDKVISLINQHREGVVFLLWGSHAQKKGAIIDKQRHHVLKAPHPSPLSAHRGFFGCNHFVLANQWLEQRGETPIDWMPVLPAESESGGSGGSGGSSGGSSGGSSGSETPGTSESATPESSGGSSGGSDKKYSIGLAIGTNSVGWAVITDEYKVPSKKFKVLGNTDRHSIKKNLIGALLFDSGETAEATRLKRTARRRYTRRKNRICYLQEIFSNEMAKVDDSFFHRLEESFLVEEDKKHERHPIFGNIVDEVAYHEKYPTIYHLRKKLVDSTDKADLRLIYLALAHMIKFRGHFLIEGDLNPDNSDVDKLFIQLVQTYNQLFEENPINASGVDAKAILSARLSKSRRLENLIAQLPGEKKNGLFGNLIALSLGLTPNFKSNFDLAEDAKLQLSKDTYDDDLDNLLAQIGDQYADLFLAAKNLSDAILLSDILRVNTEITKAPLSASMIKRYDEHHQDLTLLKALVRQQLPEKYKEIFFDQSKNGYAGYIDGGASQEEFYKFIKPILEKMDGTEELLVKLNREDLLRKQRTFDNGSIPHQIHLGELHAILRRQEDFYPFLKDNREKIEKILTFRIPYYVGPLARGNSRFAWMTRKSEETITPWNFEEVVDKGASAQSFIERMTNFDKNLPNEKVLPKHSLLYEYFTVYNELTKVKYVTEGMRKPAFLSGEQKKAIVDLLFKTNRKVTVKQLKEDYFKKIECFDSVEISGVEDRFNASLGTYHDLLKIIKDKDFLDNEENEDILEDIVLTLTLFEDREMIEERLKTYAHLFDDKVMKQLKRRRYTGWGRLSRKLINGIRDKQSGKTILDFLKSDGFANRNFMQLIHDDSLTFKEDIQKAQVSGQGDSLHEHIANLAGSPAIKKGILQTVKVVDELVKVMGRHKPENIVIEMARENQTTQKGQKNSRERMKRIEEGIKELGSQILKEHPVENTQLQNEKLYLYYLQNGRDMYVDQELDINRLSDYDVDHIVPQSFLKDDSIDNKVLTRSDKNRGKSDNVPSEEVVKKMKNYWRQLLNAKLITQRKFDNLTKAERGGLSELDKAGFIKRQLVETRQITKHVAQILDSRMNTKYDENDKLIREVKVITLKSKLVSDFRKDFQFYKVREINNYHHAHDAYLNAVVGTALIKKYPKLESEFVYGDYKVYDVRKMIAKSEQEIGKATAKYFFYSNIMNFFKTEITLANGEIRKRPLIETNGETGEIVWDKGRDFATVRKVLSMPQVNIVKKTEVQTGGFSKESILPKRNSDKLIARKKDWDPKKYGGFDSPTVAYSVLVVAKVEKGKSKKLKSVKELLGITIMERSSFEKNPIDFLEAKGYKEVKKDLIIKLPKYSLFELENGRKRMLASAGELQKGNELALPSKYVNFLYLASHYEKLKGSPEDNEQKQLFVEQHKHYLDEIIEQISEFSKRVILADANLDKVLSAYNKHRDKPIREQAENIIHLFTLTNLGAPAAFKYFDTTIDRKRYTSTKEVLDATLIHQSITGLYETRIDLSQLGGDSGGSKRTADGSEFEPKKKRKVGGGGSGATNFSLLKQAGDVEENPGPMVSKGEELFTGVVPILVELDGDVNGHKFSVSGEGEGDATYGKLTLKFICTTGKLPVPWPTLVTTLTYGVQCFSRYPDHMKQHDFFKSAMPEGYVQERTIFFKDDGNYKTRAEVKFEGDTLVNRIELKGIDFKEDGNILGHKLEYNYNSHNVYIMADKQKNGIKVNFKIRHNIEDGSVQLADHYQQNTPIGDGPVLLPDNHYLSTQSALSKDPNEKRDHMVLLEFVTAAGITLGMDELYK

SEQ ID NO: 155 - protein, 2253 aa, Artificial Sequence
  Description of Artificial Sequence: Synthetic polypeptide
MKRTADGSEFESPKKKRKVSSETGPVAVDPTLRRRIEPHEFEVFFDPRELRKETCLLYEINWGGRHSIWRHTSQNTNKHVEVNFIEKFTTERYFCPNTRCSITWFLSWSPCGECSRAITEFLSRYPHVTLFIYIARLYHHADPRNRQGLRDLISSGVTIQIMTEQESGYCWRNFVNYSPSNEAHWPRYPHLWVRLYVLELYCIILGLPPCLNILRRKQPQLTFFTIALQSCHYQRLPPHILWATGLKSGGSSGGSSGSETPGTSESATPESSGGSSGGSDKKYSIGLAIGTNSVGWAVITDEYKVPSKKFKVLGNTDRHSIKKNLIGALLFDSGETAEATRLKRTARRRYTRRKNRICYLQEIFSNEMAKVDDSFFHRLEESFLVEEDKKHERHPIFGNIVDEVAYHEKYPTIYHLRKKLVDSTDKADLRLIYLALAHMIKFRGHFLIEGDLNPDNSDVDKLFIQLVQTYNQLFEENPINASGVDAKAILSARLSKSRRLENLIAQLPGEKKNGLFGNLIALSLGLTPNFKSNFDLAEDAKLQLSKDTYDDDLDNLLAQIGDQYADLFLAAKNLSDAILLSDILRVNTEITKAPLSASMIKRYDEHHQDLTLLKALVRQQLPEKYKEIFFDQSKNGYAGYIDGGASQEEFYKFIKPILEKMDGTEELLVKLNREDLLRKQRTFDNGSIPHQIHLGELHAILRRQEDFYPFLKDNREKIEKILTFRIPYYVGPLARGNSRFAWMTRKSEETITPWNFEEVVDKGASAQSFIERMTNFDKNLPNEKVLPKHSLLYEYFTVYNELTKVKYVTEGMRKPAFLSGEQKKAIVDLLFKTNRKVTVKQLKEDYFKKIECFDSVEISGVEDRFNASLGTYHDLLKIIKDKDFLDNEENEDILEDIVLTLTLFEDREMIEERLKTYAHLFDDKVMKQLKRRRYTGWGRLSRKLINGIRDKQSGKTILDFLKSDGFANRNFMQLIHDDSLTFKEDIQKAQVSGQGDSLHEHIANLAGSPAIKKGILQTVKVVDELVKVMGRHKPENIVIEMARENQTTQKGQKNSRERMKRIEEGIKELGSQILKEHPVENTQLQNEKLYLYYLQNGRDMYVDQELDINRLSDYDVDHIVPQSFLKDDSIDNKVLTRSDKNRGKSDNVPSEEVVKKMKNYWRQLLNAKLITQRKFDNLTKAERGGLSELDKAGFIKRQLVETRQITKHVAQILDSRMNTKYDENDKLIREVKVITLKSKLVSDFRKDFQFYKVREINNYHHAHDAYLNAVVGTALIKKYPKLESEFVYGDYKVYDVRKMIAKSEQEIGKATAKYFFYSNIMNFFKTEITLANGEIRKRPLIETNGETGEIVWDKGRDFATVRKVLSMPQVNIVKKTEVQTGGFSKESILPKRNSDKLIARKKDWDPKKYGGFDSPTVAYSVLVVAKVEKGKSKKLKSVKELLGITIMERSSFEKNPIDFLEAKGYKEVKKDLIIKLPKYSLFELENGRKRMLASAGELQKGNELALPSKYVNFLYLASHYEKLKGSPEDNEQKQLFVEQHKHYLDEIIEQISEFSKRVILADANLDKVLSAYNKHRDKPIREQAENIIHLFTLTNLGAPAAFKYFDTTIDRKRYTSTKEVLDATLIHQSITGLYETRIDLSQLGGDSGGSGGSGGSIGQKTLYSFFSPSPARKRHAPSPEPAVQGTGVAGVPEESGDAAAIPAKKAPAGQEEPGTPPSSPLSAEQLDRIQRNKAAALLRLAARNVPVGFGESWKKHLSGEFGKPYFIKLMGFVAEERKHYTVYPPPHQVFTWTQMCDIKDVKVVILGQDPYHGPNQAHGLCFSVQRPVPPPPSLENIYKELSTDIEDFVHPGHGDLSGWAKQGVLLLNAVLTVRAHQANSHKERGWEQFTDAVVSWLNQNSNGLVFLLWGSYAQKKGSAIDRKRHHVLQTAHPSPLSVYRGFFGCRHFSKTNELLQKSGKKPIDWKELSGGSKRTADGSEFEPKKKRKVGGGGSGATNFSLLKQAGDVEENPGPMVSKGEELFTGVVPILVELDGDVNGHKFSVSGEGEGDATYGKLTLKFICTTGKLPVPWPTLVTTLTYGVQCFSRYPDHMKQHDFFKSAMPEGYVQERTIFFKDDGNYKTRAEVKFEGDTLVNRIELKGIDFKEDGNILGHKLEYNYNSHNVYIMADKQKNGIKVNFKIRHNIEDGSVQLADHYQQNTPIGDGPVLLPDNHYLSTQSALSKDPNEKRDHMVLLEFVTAAGITLGMDELYK

SEQ ID NO: 156 - protein, 2253 aa, Artificial Sequence
  Description of Artificial Sequence: Synthetic polypeptide
MKRTADGSEFESPKKKRKVSSETGPVAVDPTLRRRIEPHEFEVFFDPRELAKETCLLYEINWGGRHSIWRHTSQNTNKHVEVNFIEKFTTERYFCPNTRCSITWFLSWSPCGECSRAITEFLSRYPHVTLFIYIARLYHHADPRNRQGLRDLISSGVTIQIMTEQESGYCWRNFVNYSPSNEAHWPRYPHLWVRLYVLELYCIILGLPPCLNILRRKQPQLTFFTIALQSCHYQRLPPHILWATGLKSGGSSGGSSGSETPGTSESATPESSGGSSGGSDKKYSIGLAIGTNSVGWAVITDEYKVPSKKFKVLGNTDRHSIKKNLIGALLFDSGETAEATRLKRTARRRYTRRKNRICYLQEIFSNEMAKVDDSFFHRLEESFLVEEDKKHERHPIFGNIVDEVAYHEKYPTIYHLRKKLVDSTDKADLRLIYLALAHMIKFRGHFLIEGDLNPDNSDVDKLFIQLVQTYNQLFEENPINASGVDAKAILSARLSKSRRLENLIAQLPGEKKNGLFGNLIALSLGLTPNFKSNFDLAEDAKLQLSKDTYDDDLDNLLAQIGDQYADLFLAAKNLSDAILLSDILRVNTEITKAPLSASMIKRYDEHHQDLTLLKALVRQQLPEKYKEIFFDQSKNGYAGYIDGGASQEEFYKFIKPILEKMDGTEELLVKLNREDLLRKQRTFDNGSIPHQIHLGELHAILRRQEDFYPFLKDNREKIEKILTFRIPYYVGPLARGNSRFAWMTRKSEETITPWNFEEVVDKGASAQSFIERMTNFDKNLPNEKVLPKHSLLYEYFTVYNELTKVKYVTEGMRKPAFLSGEQKKAIVDLLFKTNRKVTVKQLKEDYFKKIECFDSVEISGVEDRFNASLGTYHDLLKIIKDKDFLDNEENEDILEDIVLTLTLFEDREMIEERLKTYAHLFDDKVMKQLKRRRYTGWGRLSRKLINGIRDKQSGKTILDFLKSDGFANRNFMQLIHDDSLTFKEDIQKAQVSGQGDSLHEHIANLAGSPAIKKGILQTVKVVDELVKVMGRHKPENIVIEMARENQTTQKGQKNSRERMKRIEEGIKELGSQILKEHPVENTQLQNEKLYLYYLQNGRDMYVDQELDINRLSDYDVDHIVPQSFLKDDSIDNKVLTRSDKNRGKSDNVPSEEVVKKMKNYWRQLLNAKLITQRKFDNLTKAERGGLSELDKAGFIKRQLVETRQITKHVAQILDSRMNTKYDENDKLIREVKVITLKSKLVSDFRKDFQFYKVREINNYHHAHDAYLNAVVGTALIKKYPKLESEFVYGDYKVYDVRKMIAKSEQEIGKATAKYFFYSNIMNFFKTEITLANGEIRKRPLIETNGETGEIVWDKGRDFATVRKVLSMPQVNIVKKTEVQTGGFSKESILPKRNSDKLIARKKDWDPKKYGGFDSPTVAYSVLVVAKVEKGKSKKLKSVKELLGITIMERSSFEKNPIDFLEAKGYKEVKKDLIIKLPKYSLFELENGRKRMLASAGELQKGNELALPSKYVNFLYLASHYEKLKGSPEDNEQKQLFVEQHKHYLDEIIEQISEFSKRVILADANLDKVLSAYNKHRDKPIREQAENIIHLFTLTNLGAPAAFKYFDTTIDRKRYTSTKEVLDATLIHQSITGLYETRIDLSQLGGDSGGSGGSGGSIGQKTLYSFFSPSPARKRHAPSPEPAVQGTGVAGVPEESGDAAAIPAKKAPAGQEEPGTPPSSPLSAEQLDRIQRNKAAALLRLAARNVPVGFGESWKKHLSGEFGKPYFIKLMGFVAEERKHYTVYPPPHQVFTWTQMCDIKDVKVVILGQDPYHGPNQAHGLCFSVQRPVPPPPSLENIYKELSTDIEDFVHPGHGDLSGWAKQGVLLLNAVLTVRAHQANSHKERGWEQFTDAVVSWLNQNSNGLVFLLWGSYAQKKGSAIDRKRHHVLQTAHPSPLSVYRGFFGCRHFSKTNELLQKSGKKPIDWKELSGGSKRTADGSEFEPKKKRKVGGGGSGATNFSLLKQAGDVEENPGPMVSKGEELFTGVVPILVELDGDVNGHKFSVSGEGEGDATYGKLTLKFICTTGKLPVPWPTLVTTLTYGVQCFSRYPDHMKQHDFFKSAMPEGYVQERTIFFKDDGNYKTRAEVKFEGDTLVNRIELKGIDFKEDGNILGHKLEYNYNSHNVYIMADKQKNGIKVNFKIRHNIEDGSVQLADHYQQNTPIGDGPVLLPDNHYLSTQSALSKDPNEKRDHMVLLEFVTAAGITLGMDELYK

SEQ ID NO: 157 - protein, 2253 aa, Artificial Sequence
  Description of Artificial Sequence: Synthetic polypeptide
MKRTADGSEFESPKKKRKVSSETGPVAVDPTLRRRIEPHEFEVFFDPRELAAETCLLYEINWGGRHSIWRHTSQNTNKHVEVNFIEKFTTERYFCPNTRCSITWFLSWSPCGECSRAITEFLSRYPHVTLFIYIARLYHHADPRNRQGLRDLISSGVTIQIMTEQESGYCWRNFVNYSPSNEAHWPRYPHLWVRLYVLELYCIILGLPPCLNILRRKQPQLTFFTIALQSCHYQRLPPHILWATGLKSGGSSGGSSGSETPGTSESATPESSGGSSGGSDKKYSIGLAIGTNSVGWAVITDEYKVPSKKFKVLGNTDRHSIKKNLIGALLFDSGETAEATRLKRTARRRYTRRKNRICYLQEIFSNEMAKVDDSFFHRLEESFLVEEDKKHERHPIFGNIVDEVAYHEKYPTIYHLRKKLVDSTDKADLRLIYLALAHMIKFRGHFLIEGDLNPDNSDVDKLFIQLVQTYNQLFEENPINASGVDAKAILSARLSKSRRLENLIAQLPGEKKNGLFGNLIALSLGLTPNFKSNFDLAEDAKLQLSKDTYDDDLDNLLAQIGDQYADLFLAAKNLSDAILLSDILRVNTEITKAPLSASMIKRYDEHHQDLTLLKALVRQQLPEKYKEIFFDQSKNGYAGYIDGGASQEEFYKFIKPILEKMDGTEELLVKLNREDLLRKQRTFDNGSIPHQIHLGELHAILRRQEDFYPFLKDNREKIEKILTFRIPYYVGPLARGNSRFAWMTRKSEETITPWNFEEVVDKGASAQSFIERMTNFDKNLPNEKVLPKHSLLYEYFTVYNELTKVKYVTEGMRKPAFLSGEQKKAIVDLLFKTNRKVTVKQLKEDYFKKIECFDSVEISGVEDRFNASLGTYHDLLKIIKDKDFLDNEENEDILEDIVLTLTLFEDREMIEERLKTYAHLFDDKVMKQLKRRRYTGWGRLSRKLINGIRDKQSGKTILDFLKSDGFANRNFMQLIHDDSLTFKEDIQKAQVSGQGDSLHEHIANLAGSPAIKKGILQTVKVVDELVKVMGRHKPENIVIEMARENQTTQKGQKNSRERMKRIEEGIKELGSQILKEHPVENTQLQNEKLYLYYLQNGRDMYVDQELDINRLSDYDVDHIVPQSFLKDDSIDNKVLTRSDKNRGKSDNVPSEEVVKKMKNYWRQLLNAKLITQRKFDNLTKAERGGLSELDKAGFIKRQLVETRQITKHVAQILDSRMNTKYDENDKLIREVKVITLKSKLVSDFRKDFQFYKVREINNYHHAHDAYLNAVVGTALIKKYPKLESEFVYGDYKVYDVRKMIAKSEQEIGKATAKYFFYSNIMNFFKTEITLANGEIRKRPLIETNGETGEIVWDKGRDFATVRKVLSMPQVNIVKKTEVQTGGFSKESILPKRNSDKLIARKKDWDPKKYGGFDSPTVAYSVLVVAKVEKGKSKKLKSVKELLGITIMERSSFEKNPIDFLEAKGYKEVKKDLIIKLPKYSLFELENGRKRMLASAGELQKGNELALPSKYVNFLYLASHYEKLKGSPEDNEQKQLFVEQHKHYLDEIIEQISEFSKRVILADANLDKVLSAYNKHRDKPIREQAENIIHLFTLTNLGAPAAFKYFDTTIDRKRYTSTKEVLDATLIHQSITGLYETRIDLSQLGGDSGGSGGSGGSIGQKTLYSFFSPSPARKRHAPSPEPAVQGTGVAGVPEESGDAAAIPAKKAPAGQEEPGTPPSSPLSAEQLDRIQRNKAAALLRLAARNVPVGFGESWKKHLSGEFGKPYFIKLMGFVAEERKHYTVYPPPHQVFTWTQMCDIKDVKVVILGQDPYHGPNQAHGLCFSVQRPVPPPPSLENIYKELSTDIEDFVHPGHGDLSGWAKQGVLLLNAVLTVRAHQANSHKERGWEQFTDAVVSWLNQNSNGLVFLLWGSYAQKKGSAIDRKRHHVLQTAHPSPLSVYRGFFGCRHFSKTNELLQKSGKKPIDWKELSGGSKRTADGSEFEPKKKRKVGGGGSGATNFSLLKQAGDVEENPGPMVSKGEELFTGVVPILVELDGDVNGHKFSVSGEGEGDATYGKLTLKFICTTGKLPVPWPTLVTTLTYGVQCFSRYPDHMKQHDFFKSAMPEGYVQERTIFFKDDGNYKTRAEVKFEGDTLVNRIELKGIDFKEDGNILGHKLEYNYNSHNVYIMADKQKNGIKVNFKIRHNIEDGSVQLADHYQQNTPIGDGPVLLPDNHYLSTQSALSKDPNEKRDHMVLLEFVTAAGITLGMDELYK

SEQ ID NO: 158 - protein, 2025 aa, Artificial Sequence
  Description of Artificial Sequence: Synthetic polypeptide
MKRTADGSEFESPKKKRKVSGGSSGGSSGSETPGTSESATPESSGGSSGGSDKKYSIGLAIGTNSVGWAVITDEYKVPSKKFKVLGNTDRHSIKKNLIGALLFDSGETAEATRLKRTARRRYTRRKNRICYLQEIFSNEMAKVDDSFFHRLEESFLVEEDKKHERHPIFGNIVDEVAYHEKYPTIYHLRKKLVDSTDKADLRLIYLALAHMIKFRGHFLIEGDLNPDNSDVDKLFIQLVQTYNQLFEENPINASGVDAKAILSARLSKSRRLENLIAQLPGEKKNGLFGNLIALSLGLTPNFKSNFDLAEDAKLQLSKDTYDDDLDNLLAQIGDQYADLFLAAKNLSDAILLSDILRVNTEITKAPLSASMIKRYDEHHQDLTLLKALVRQQLPEKYKEIFFDQSKNGYAGYIDGGASQEEFYKFIKPILEKMDGTEELLVKLNREDLLRKQRTFDNGSIPHQIHLGELHAILRRQEDFYPFLKDNREKIEKILTFRIPYYVGPLARGNSRFAWMTRKSEETITPWNFEEVVDKGASAQSFIERMTNFDKNLPNEKVLPKHSLLYEYFTVYNELTKVKYVTEGMRKPAFLSGEQKKAIVDLLFKTNRKVTVKQLKEDYFKKIECFDSVEISGVEDRFNASLGTYHDLLKIIKDKDFLDNEENEDILEDIVLTLTLFEDREMIEERLKTYAHLFDDKVMKQLKRRRYTGWGRLSRKLINGIRDKQSGKTILDFLKSDGFANRNFMQLIHDDSLTFKEDIQKAQVSGQGDSLHEHIANLAGSPAIKKGILQTVKVVDELVKVMGRHKPENIVIEMARENQTTQKGQKNSRERMKRIEEGIKELGSQILKEHPVENTQLQNEKLYLYYLQNGRDMYVDQELDINRLSDYDVDHIVPQSFLKDDSIDNKVLTRSDKNRGKSDNVPSEEVVKKMKNYWRQLLNAKLITQRKFDNLTKAERGGLSELDKAGFIKRQLVETRQITKHVAQILDSRMNTKYDENDKLIREVKVITLKSKLVSDFRKDFQFYKVREINNYHHAHDAYLNAVVGTALIKKYPKLESEFVYGDYKVYDVRKMIAKSEQEIGKATAKYFFYSNIMNFFKTEITLANGEIRKRPLIETNGETGEIVWDKGRDFATVRKVLSMPQVNIVKKTEVQTGGFSKESILPKRNSDKLIARKKDWDPKKYGGFDSPTVAYSVLVVAKVEKGKSKKLKSVKELLGITIMERSSFEKNPIDFLEAKGYKEVKKDLIIKLPKYSLFELENGRKRMLASAGELQKGNELALPSKYVNFLYLASHYEKLKGSPEDNEQKQLFVEQHKHYLDEIIEQISEFSKRVILADANLDKVLSAYNKHRDKPIREQAENIIHLFTLTNLGAPAAFKYFDTTIDRKRYTSTKEVLDATLIHQSITGLYETRIDLSQLGGDSGGSGGSGGSIGQKTLYSFFSPSPARKRHAPSPEPAVQGTGVAGVPEESGDAAAIPAKKAPAGQEEPGTPPSSPLSAEQLDRIQRNKAAALLRLAARNVPVGFGESWKKHLSGEFGKPYFIKLMGFVAEERKHYTVYPPPHQVFTWTQMCDIKDVKVVILGQDPYHGPNQAHGLCFSVQRPVPPPPSLENIYKELSTDIEDFVHPGHGDLSGWAKQGVLLLNAVLTVRAHQANSHKERGWEQFTDAVVSWLNQNSNGLVFLLWGSYAQKKGSAIDRKRHHVLQTAHPSPLSVYRGFFGCRHFSKTNELLQKSGKKPIDWKELSGGSKRTADGSEFEPKKKRKVGGGGSGATNFSLLKQAGDVEENPGPMVSKGEELFTGVVPILVELDGDVNGHKFSVSGEGEGDATYGKLTLKFICTTGKLPVPWPTLVTTLTYGVQCFSRYPDHMKQHDFFKSAMPEGYVQERTIFFKDDGNYKTRAEVKFEGDTLVNRIELKGIDFKEDGNILGHKLEYNYNSHNVYIMADKQKNGIKVNFKIRHNIEDGSVQLADHYQQNTPIGDGPVLLPDNHYLSTQSALSKDPNEKRDHMVLLEFVTAAGITLGMDELYK

SEQ ID NO: 159 - protein, 2253 aa, Artificial Sequence
  Description of Artificial Sequence: Synthetic polypeptide
MKRTADGSEFESPKKKRKVIGQKTLYSFFSPSPARKRHAPSPEPAVQGTGVAGVPEESGDAAAIPAKKAPAGQEEPGTPPSSPLSAEQLDRIQRNKAAALLRLAARNVPVGFGESWKKHLSGEFGKPYFIKLMGFVAEERKHYTVYPPPHQVFTWTQMCDIKDVKVVILGQDPYHGPNQAHGLCFSVQRPVPPPPSLENIYKELSTDIEDFVHPGHGDLSGWAKQGVLLLNAVLTVRAHQANSHKERGWEQFTDAVVSWLNQNSNGLVFLLWGSYAQKKGSAIDRKRHHVLQTAHPSPLSVYRGFFGCRHFSKTNELLQKSGKKPIDWKELSGGSGGSGGSSSETGPVAVDPTLRRRIEPHEFEVFFDPRELRKETCLLYEINWGGRHSIWRHTSQNTNKHVEVNFIEKFTTERYFCPNTRCSITWFLSWSPCGECSRAITEFLSRYPHVTLFIYIARLYHHADPRNRQGLRDLISSGVTIQIMTEQESGYCWRNFVNYSPSNEAHWPRYPHLWVRLYVLELYCIILGLPPCLNILRRKQPQLTFFTIALQSCHYQRLPPHILWATGLKSGGSSGGSSGSETPGTSESATPESSGGSSGGSDKKYSIGLAIGTNSVGWAVITDEYKVPSKKFKVLGNTDRHSIKKNLIGALLFDSGETAEATRLKRTARRRYTRRKNRICYLQEIFSNEMAKVDDSFFHRLEESFLVEEDKKHERHPIFGNIVDEVAYHEKYPTIYHLRKKLVDSTDKADLRLIYLALAHMIKFRGHFLIEGDLNPDNSDVDKLFIQLVQTYNQLFEENPINASGVDAKAILSARLSKSRRLENLIAQLPGEKKNGLFGNLIALSLGLTPNFKSNFDLAEDAKLQLSKDTYDDDLDNLLAQIGDQYADLFLAAKNLSDAILLSDILRVNTEITKAPLSASMIKRYDEHHQDLTLLKALVRQQLPEKYKEIFFDQSKNGYAGYIDGGASQEEFYKFIKPILEKMDGTEELLVKLNREDLLRKQRTFDNGSIPHQIHLGELHAILRRQEDFYPFLKDNREKIEKILTFRIPYYVGPLARGNSRFAWMTRKSEETITPWNFEEVVDKGASAQSFIERMTNFDKNLPNEKVLPKHSLLYEYFTVYNELTKVKYVTEGMRKPAFLSGEQKKAIVDLLFKTNRKVTVKQLKEDYFKKIECFDSVEISGVEDRFNASLGTYHDLLKIIKDKDFLDNEENEDILEDIVLTLTLFEDREMIEERLKTYAHLFDDKVMKQLKRRRYTGWGRLSRKLINGIRDKQSGKTILDFLKSDGFANRNFMQLIHDDSLTFKEDIQKAQVSGQGDSLHEHIANLAGSPAIKKGILQTVKVVDELVKVMGRHKPENIVIEMARENQTTQKGQKNSRERMKRIEEGIKELGSQILKEHPVENTQLQNEKLYLYYLQNGRDMYVDQELDINRLSDYDVDHIVPQSFLKDDSIDNKVLTRSDKNRGKSDNVPSEEVVKKMKNYWRQLLNAKLITQRKFDNLTKAERGGLSELDKAGFIKRQLVETRQITKHVAQILDSRMNTKYDENDKLIREVKVITLKSKLVSDFRKDFQFYKVREINNYHHAHDAYLNAVVGTALIKKYPKLESEFVYGDYKVYDVRKMIAKSEQEIGKATAKYFFYSNIMNFFKTEITLANGEIRKRPLIETNGETGEIVWDKGRDFATVRKVLSMPQVNIVKKTEVQTGGFSKESILPKRNSDKLIARKKDWDPKKYGGFDSPTVAYSVLVVAKVEKGKSKKLKSVKELLGITIMERSSFEKNPIDFLEAKGYKEVKKDLIIKLPKYSLFELENGRKRMLASAGELQKGNELALPSKYVNFLYLASHYEKLKGSPEDNEQKQLFVEQHKHYLDEIIEQISEFSKRVILADANLDKVLSAYNKHRDKPIREQAENIIHLFTLTNLGAPAAFKYFDTTIDRKRYTSTKEVLDATLIHQSITGLYETRIDLSQLGGDSGGSKRTADGSEFEPKKKRKVGGGGSGATNFSLLKQAGDVEENPGPMVSKGEELFTGVVPILVELDGDVNGHKFSVSGEGEGDATYGKLTLKFICTTGKLPVPWPTLVTTLTYGVQCFSRYPDHMKQHDFFKSAMPEGYVQERTIFFKDDGNYKTRAEVKFEGDTLVNRIELKGIDFKEDGNILGHKLEYNYNSHNVYIMADKQKNGIKVNFKIRHNIEDGSVQLADHYQQNTPIGDGPVLLPDNHYLSTQSALSKDPNEKRDHMVLLEFVTAAGITLGMDELYK

SEQ ID NO: 160 - protein, 2253 aa, Artificial Sequence
  Description of Artificial Sequence: Synthetic polypeptide
MKRTADGSEFESPKKKRKVIGQKTLYSFFSPSPARKRHAPSPEPAVQGTGVAGVPEESGDAAAIPAKKAPAGQEEPGTPPSSPLSAEQLDRIQRNKAAALLRLAARNVPVGFGESWKKHLSGEFGKPYFIKLMGFVAEERKHYTVYPPPHQVFTWTQMCDIKDVKVVILGQDPYHGPNQAHGLCFSVQRPVPPPPSLENIYKELSTDIEDFVHPGHGDLSGWAKQGVLLLNAVLTVRAHQANSHKERGWEQFTDAVVSWLNQNSNGLVFLLWGSYAQKKGSAIDRKRHHVLQTAHPSPLSVYRGFFGCRHFSKTNELLQKSGKKPIDWKELSGGSGGSGGSSSETGPVAVDPTLRRRIEPHEFEVFFDPRELAKETCLLYEINWGGRHSIWRHTSQNTNKHVEVNFIEKFTTERYFCPNTRCSITWFLSWSPCGECSRAITEFLSRYPHVTLFIYIARLYHHADPRNRQGLRDLISSGVTIQIMTEQESGYCWRNFVNYSPSNEAHWPRYPHLWVRLYVLELYCIILGLPPCLNILRRKQPQLTFFTIALQSCHYQRLPPHILWATGLKSGGSSGGSSGSETPGTSESATPESSGGSSGGSDKKYSIGLAIGTNSVGWAVITDEYKVPSKKFKVLGNTDRHSIKKNLIGALLFDSGETAEATRLKRTARRRYTRRKNRICYLQEIFSNEMAKVDDSFFHRLEESFLVEEDKKHERHPIFGNIVDEVAYHEKYPTIYHLRKKLVDSTDKADLRLIYLALAHMIKFRGHFLIEGDLNPDNSDVDKLFIQLVQTYNQLFEENPINASGVDAKAILSARLSKSRRLENLIAQLPGEKKNGLFGNLIALSLGLTPNFKSNFDLAEDAKLQLSKDTYDDDLDNLLAQIGDQYADLFLAAKNLSDAILLSDILRVNTEITKAPLSASMIKRYDEHHQDLTLLKALVRQQLPEKYKEIFFDQSKNGYAGYIDGGASQEEFYKFIKPILEKMDGTEELLVKLNREDLLRKQRTFDNGSIPHQIHLGELHAILRRQEDFYPFLKDNREKIEKILTFRIPYYVGPLARGNSRFAWMTRKSEETITPWNFEEVVDKGASAQSFIERMTNFDKNLPNEKVLPKHSLLYEYFTVYNELTKVKYVTEGMRKPAFLSGEQKKAIVDLLFKTNRKVTVKQLKEDYFKKIECFDSVEISGVEDRFNASLGTYHDLLKIIKDKDFLDNEENEDILEDIVLTLTLFEDREMIEERLKTYAHLFDDKVMKQLKRRRYTGWGRLSRKLINGIRDKQSGKTILDFLKSDGFANRNFMQLIHDDSLTFKEDIQKAQVSGQGDSLHEHIANLAGSPAIKKGILQTVKVVDELVKVMGRHKPENIVIEMARENQTTQKGQKNSRERMKRIEEGIKELGSQILKEHPVENTQLQNEKLYLYYLQNGRDMYVDQELDINRLSDYDVDHIVPQSFLKDDSIDNKVLTRSDKNRGKSDNVPSEEVVKKMKNYWRQLLNAKLITQRKFDNLTKAERGGLSELDKAGFIKRQLVETRQITKHVAQILDSRMNTKYDENDKLIREVKVITLKSKLVSDFRKDFQFYKVREINNYHHAHDAYLNAVVGTALIKKYPKLESEFVYGDYKVYDVRKMIAKSEQEIGKATAKYFFYSNIMNFFKTEITLANGEIRKRPLIETNGETGEIVWDKGRDFATVRKVLSMPQVNIVKKTEVQTGGFSKESILPKRNSDKLIARKKDWDPKKYGGFDSPTVAYSVLVVAKVEKGKSKKLKSVKELLGITIMERSSFEKNPIDFLEAKGYKEVKKDLIIKLPKYSLFELENGRKRMLASAGELQKGNELALPSKYVNFLYLASHYEKLKGSPEDNEQKQLFVEQHKHYLDEIIEQISEFSKRVILADANLDKVLSAYNKHRDKPIREQAENIIHLFTLTNLGAPAAFKYFDTTIDRKRYTSTKEVLDATLIHQSITGLYETRIDLSQLGGDSGGSKRTADGSEFEPKKKRKVGGGGSGATNFSLLKQAGDVEENPGPMVSKGEELFTGVVPILVELDGDVNGHKFSVSGEGEGDATYGKLTLKFICTTGKLPVPWPTLVTTLTYGVQCFSRYPDHMKQHDFFKSAMPEGYVQERTIFFKDDGNYKTRAEVKFEGDTLVNRIELKGIDFKEDGNILGHKLEYNYNSHNVYIMADKQKNGIKVNFKIRHNIEDGSVQLADHYQQNTPIGDGPVLLPDNHYLSTQSALSKDPNEKRDHMVLLEFVTAAGITLGMDELYK

SEQ ID NO: 161 - protein, 2253 aa, Artificial Sequence
  Description of Artificial Sequence: Synthetic polypeptide
MKRTADGSEFESPKKKRKVIGQKTLYSFFSPSPARKRHAPSPEPAVQGTGVAGVPEESGDAAAIPAKKAPAGQEEPGTPPSSPLSAEQLDRIQRNKAAALLRLAARNVPVGFGESWKKHLSGEFGKPYFIKLMGFVAEERKHYTVYPPPHQVFTWTQMCDIKDVKVVILGQDPYHGPNQAHGLCFSVQRPVPPPPSLENIYKELSTDIEDFVHPGHGDLSGWAKQGVLLLNAVLTVRAHQANSHKERGWEQFTDAVVSWLNQNSNGLVFLLWGSYAQKKGSAIDRKRHHVLQTAHPSPLSVYRGFFGCRHFSKTNELLQKSGKKPIDWKELSGGSGGSGGSSSETGPVAVDPTLRRRIEPHEFEVFFDPRELAAETCLLYEINWGGRHSIWRHTSQNTNKHVEVNFIEKFTTERYFCPNTRCSITWFLSWSPCGECSRAITEFLSRYPHVTLFIYIARLYHHADPRNRQGLRDLISSGVTIQIMTEQESGYCWRNFVNYSPSNEAHWPRYPHLWVRLYVLELYCIILGLPPCLNILRRKQPQLTFFTIALQSCHYQRLPPHILWATGLKSGGSSGGSSGSETPGTSESATPESSGGSSGGSDKKYSIGLAIGTNSVGWAVITDEYKVPSKKFKVLGNTDRHSIKKNLIGALLFDSGETAEATRLKRTARRRYTRRKNRICYLQEIFSNEMAKVDDSFFHRLEESFLVEEDKKHERHPIFGNIVDEVAYHEKYPTIYHLRKKLVDSTDKADLRLIYLALAHMIKFRGHFLIEGDLNPDNSDVDKLFIQLVQTYNQLFEENPINASGVDAKAILSARLSKSRRLENLIAQLPGEKKNGLFGNLIALSLGLTPNFKSNFDLAEDAKLQLSKDTYDDDLDNLLAQIGDQYADLFLAAKNLSDAILLSDILRVNTEITKAPLSASMIKRYDEHHQDLTLLKALVRQQLPEKYKEIFFDQSKNGYAGYIDGGASQEEFYKFIKPILEKMDGTEELLVKLNREDLLRKQRTFDNGSIPHQIHLGELHAILRRQEDFYPFLKDNREKIEKILTFRIPYYVGPLARGNSRFAWMTRKSEETITPWNFEEVVDKGASAQSFIERMTNFDKNLPNEKVLPKHSLLYEYFTVYNELTKVKYVTEGMRKPAFLSGEQKKAIVDLLFKTNRKVTVKQLKEDYFKKIECFDSVEISGVEDRFNASLGTYHDLLKIIKDKDFLDNEENEDILEDIVLTLTLFEDREMIEERLKTYAHLFDDKVMKQLKRRRYTGWGRLSRKLINGIRDKQSGKTILDFLKSDGFANRNFMQLIHDDSLTFKEDIQKAQVSGQGDSLHEHIANLAGSPAIKKGILQTVKVVDELVKVMGRHKPENIVIEMARENQTTQKGQKNSRERMKRIEEGIKELGSQILKEHPVENTQLQNEKLYLYYLQNGRDMYVDQELDINRLSDYDVDHIVPQSFLKDDSIDNKVLTRSDKNRGKSDNVPSEEVVKKMKNYWRQLLNAKLITQRKFDNLTKAERGGLSELDKAGFIKRQLVETRQITKHVAQILDSRMNTKYDENDKLIREVKVITLKSKLVSDFRKDFQFYKVREINNYHHAHDAYLNAVVGTALIKKYPKLESEFVYGDYKVYDVRKMIAKSEQEIGKATAKYFFYSNIMNFFKTEITLANGEIRKRPLIETNGETGEIVWDKGRDFATVRKVLSMPQVNIVKKTEVQTGGFSKESILPKRNSDKLIARKKDWDPKKYGGFDSPTVAYSVLVVAKVEKGKSKKLKSVKELLGITIMERSSFEKNPIDFLEAKGYKEVKKDLIIKLPKYSLFELENGRKRMLASAGELQKGNELALPSKYVNFLYLASHYEKLKGSPEDNEQKQLFVEQHKHYLDEIIEQISEFSKRVILADANLDKVLSAYNKHRDKPIREQAENIIHLFTLTNLGAPAAFKYFDTTIDRKRYTSTKEVLDATLIHQSITGLYETRIDLSQLGGDSGGSKRTADGSEFEPKKKRKVGGGGSGATNFSLLKQAGDVEENPGPMVSKGEELFTGVVPILVELDGDVNGHKFSVSGEGEGDATYGKLTLKFICTTGKLPVPWPTLVTTLTYGVQCFSRYPDHMKQHDFFKSAMPEGYVQERTIFFKDDGNYKTRAEVKFEGDTLVNRIELKGIDFKEDGNILGHKLEYNYNSHNVYIMADKQKNGIKVNFKIRHNIEDGSVQLADHYQQNTPIGDGPVLLPDNHYLSTQSALSKDPNEKRDHMVLLEFVTAAGITLGMDELYK

SEQ ID NO: 162 - protein, 2025 aa, Artificial Sequence
  Description of Artificial Sequence: Synthetic polypeptide
MKRTADGSEFESPKKKRKVIGQKTLYSFFSPSPARKRHAPSPEPAVQGTGVAGVPEESGDAAAIPAKKAPAGQEEPGTPPSSPLSAEQLDRIQRNKAAALLRLAARNVPVGFGESWKKHLSGEFGKPYFIKLMGFVAEERKHYTVYPPPHQVFTWTQMCDIKDVKVVILGQDPYHGPNQAHGLCFSVQRPVPPPPSLENIYKELSTDIEDFVHPGHGDLSGWAKQGVLLLNAVLTVRAHQANSHKERGWEQFTDAVVSWLNQNSNGLVFLLWGSYAQKKGSAIDRKRHHVLQTAHPSPLSVYRGFFGCRHFSKTNELLQKSGKKPIDWKELSGGSGGSGGSSGGSSGGSSGSETPGTSESATPESSGGSSGGSDKKYSIGLAIGTNSVGWAVITDEYKVPSKKFKVLGNTDRHSIKKNLIGALLFDSGETAEATRLKRTARRRYTRRKNRICYLQEIFSNEMAKVDDSFFHRLEESFLVEEDKKHERHPIFGNIVDEVAYHEKYPTIYHLRKKLVDSTDKADLRLIYLALAHMIKFRGHFLIEGDLNPDNSDVDKLFIQLVQTYNQLFEENPINASGVDAKAILSARLSKSRRLENLIAQLPGEKKNGLFGNLIALSLGLTPNFKSNFDLAEDAKLQLSKDTYDDDLDNLLAQIGDQYADLFLAAKNLSDAILLSDILRVNTEITKAPLSASMIKRYDEHHQDLTLLKALVRQQLPEKYKEIFFDQSKNGYAGYIDGGASQEEFYKFIKPILEKMDGTEELLVKLNREDLLRKQRTFDNGSIPHQIHLGELHAILRRQEDFYPFLKDNREKIEKILTFRIPYYVGPLARGNSRFAWMTRKSEETITPWNFEEVVDKGASAQSFIERMTNFDKNLPNEKVLPKHSLLYEYFTVYNELTKVKYVTEGMRKPAFLSGEQKKAIVDLLFKTNRKVTVKQLKEDYFKKIECFDSVEISGVEDRFNASLGTYHDLLKIIKDKDFLDNEENEDILEDIVLTLTLFEDREMIEERLKTYAHLFDDKVMKQLKRRRYTGWGRLSRKLINGIRDKQSGKTILDFLKSDGFANRNFMQLIHDDSLTFKEDIQKAQVSGQGDSLHEHIANLAGSPAIKKGILQTVKVVDELVKVMGRHKPENIVIEMARENQTTQKGQKNSRERMKRIEEGIKELGSQILKEHPVENTQLQNEKLYLYYLQNGRDMYVDQELDINRLSDYDVDHIVPQSFLKDDSIDNKVLTRSDKNRGKSDNVPSEEVVKKMKNYWRQLLNAKLITQRKFDNLTKAERGGLSELDKAGFIKRQLVETRQITKHVAQILDSRMNTKYDENDKLIREVKVITLKSKLVSDFRKDFQFYKVREINNYHHAHDAYLNAVVGTALIKKYPKLESEFVYGDYKVYDVRKMIAKSEQEIGKATAKYFFYSNIMNFFKTEITLANGEIRKRPLIETNGETGEIVWDKGRDFATVRKVLSMPQVNIVKKTEVQTGGFSKESILPKRNSDKLIARKKDWDPKKYGGFDSPTVAYSVLVVAKVEKGKSKKLKSVKELLGITIMERSSFEKNPIDFLEAKGYKEVKKDLIIKLPKYSLFELENGRKRMLASAGELQKGNELALPSKYVNFLYLASHYEKLKGSPEDNEQKQLFVEQHKHYLDEIIEQISEFSKRVILADANLDKVLSAYNKHRDKPIREQAENIIHLFTLTNLGAPAAFKYFDTTIDRKRYTSTKEVLDATLIHQSITGLYETRIDLSQLGGDSGGSKRTADGSEFEPKKKRKVGGGGSGATNFSLLKQAGDVEENPGPMVSKGEELFTGVVPILVELDGDVNGHKFSVSGEGEGDATYGKLTLKFICTTGKLPVPWPTLVTTLTYGVQCFSRYPDHMKQHDFFKSAMPEGYVQERTIFFKDDGNYKTRAEVKFEGDTLVNRIELKGIDFKEDGNILGHKLEYNYNSHNVYIMADKQKNGIKVNFKIRHNIEDGSVQLADHYQQNTPIGDGPVLLPDNHYLSTQSALSKDPNEKRDHMVLLEFVTAAGITLGMDELYK

SEQ ID NO: 163 - protein, 1931 aa, Artificial Sequence
  Description of Artificial Sequence: Synthetic polypeptide
MKRTADGSEFESPKKKRKVSSETGPVAVDPTLRRRIEPHEFEVFFDPRELRKETCLLYEINWGGRHSIWRHTSQNTNKHVEVNFIEKFTTERYFCPNTRCSITWFLSWSPCGECSRAITEFLSRYPHVTLFIYIARLYHHADPRNRQGLRDLISSGVTIQIMTEQESGYCWRNFVNYSPSNEAHWPRYPHLWVRLYVLELYCIILGLPPCLNILRRKQPQLTFFTIALQSCHYQRLPPHILWATGLKSGGSSGGSSGSETPGTSESATPESSGGSSGGSDKKYSIGLAIGTNSVGWAVITDEYKVPSKKFKVLGNTDRHSIKKNLIGALLFDSGETAEATRLKRTARRRYTRRKNRICYLQEIFSNEMAKVDDSFFHRLEESFLVEEDKKHERHPIFGNIVDEVAYHEKYPTIYHLRKKLVDSTDKADLRLIYLALAHMIKFRGHFLIEGDLNPDNSDVDKLFIQLVQTYNQLFEENPINASGVDAKAILSARLSKSRRLENLIAQLPGEKKNGLFGNLIALSLGLTPNFKSNFDLAEDAKLQLSKDTYDDDLDNLLAQIGDQYADLFLAAKNLSDAILLSDILRVNTEITKAPLSASMIKRYDEHHQDLTLLKALVRQQLPEKYKEIFFDQSKNGYAGYIDGGASQEEFYKFIKPILEKMDGTEELLVKLNREDLLRKQRTFDNGSIPHQIHLGELHAILRRQEDFYPFLKDNREKIEKILTFRIPYYVGPLARGNSRFAWMTRKSEETITPWNFEEVVDKGASAQSFIERMTNFDKNLPNEKVLPKHSLLYEYFTVYNELTKVKYVTEGMRKPAFLSGEQKKAIVDLLFKTNRKVTVKQLKEDYFKKIECFDSVEISGVEDRFNASLGTYHDLLKIIKDKDFLDNEENEDILEDIVLTLTLFEDREMIEERLKTYAHLFDDKVMKQLKRRRYTGWGRLSRKLINGIRDKQSGKTILDFLKSDGFANRNFMQLIHDDSLTFKEDIQKAQVSGQGDSLHEHIANLAGSPAIKKGILQTVKVVDELVKVMGRHKPENIVIEMARENQTTQKGQKNSRERMKRIEEGIKELGSQILKEHPVENTQLQNEKLYLYYLQNGRDMYVDQELDINRLSDYDVDHIVPQSFLKDDSIDNKVLTRSDKNRGKSDNVPSEEVVKKMKNYWRQLLNAKLITQRKFDNLTKAERGGLSELDKAGFIKRQLVETRQITKHVAQILDSRMNTKYDENDKLIREVKVITLKSKLVSDFRKDFQFYKVREINNYHHAHDAYLNAVVGTALIKKYPKLESEFVYGDYKVYDVRKMIAKSEQEIGKATAKYFFYSNIMNFFKTEITLANGEIRKRPLIETNGETGEIVWDKGRDFATVRKVLSMPQVNIVKKTEVQTGGFSKESILPKRNSDKLIARKKDWDPKKYGGFDSPTVAYSVLVVAKVEKGKSKKLKSVKELLGITIMERSSFEKNPIDFLEAKGYKEVKKDLIIKLPKYSLFELENGRKRMLASAGELQKGNELALPSKYVNFLYLASHYEKLKGSPEDNEQKQLFVEQHKHYLDEIIEQISEFSKRVILADANLDKVLSAYNKHRDKPIREQAENIIHLFTLTNLGAPAAFKYFDTTIDRKRYTSTKEVLDATLIHQSITGLYETRIDLSQLGGDSGGSKRTADGSEFEPKKKRKVGGGGSGATNFSLLKQAGDVEENPGPMVSKGEELFTGVVPILVELDGDVNGHKFSVSGEGEGDATYGKLTLKFICTTGKLPVPWPTLVTTLTYGVQCFSRYPDHMKQHDFFKSAMPEGYVQERTIFFKDDGNYKTRAEVKFEGDTLVNRIELKGIDFKEDGNILGHKLEYNYNSHNVYIMADKQKNGIKVNFKIRHNIEDGSVQLADHYQQNTPIGDGPVLLPDNHYLSTQSALSKDPNEKRDHMVLLEFVTAAGITLGMDELYK

SEQ ID NO: 164 - protein, 1703 aa, Artificial Sequence
  Description of Artificial Sequence: Synthetic polypeptide
MKRTADGSEFESPKKKRKVSGGSSGGSSGSETPGTSESATPESSGGSSGGSDKKYSIGLAIGTNSVGWAVITDEYKVPSKKFKVLGNTDRHSIKKNLIGALLFDSGETAEATRLKRTARRRYTRRKNRICYLQEIFSNEMAKVDDSFFHRLEESFLVEEDKKHERHPIFGNIVDEVAYHEKYPTIYHLRKKLVDSTDKADLRLIYLALAHMIKFRGHFLIEGDLNPDNSDVDKLFIQLVQTYNQLFEENPINASGVDAKAILSARLSKSRRLENLIAQLPGEKKNGLFGNLIALSLGLTPNFKSNFDLAEDAKLQLSKDTYDDDLDNLLAQIGDQYADLFLAAKNLSDAILLSDILRVNTEITKAPLSASMIKRYDEHHQDLTLLKALVRQQLPEKYKEIFFDQSKNGYAGYIDGGASQEEFYKFIKPILEKMDGTEELLVKLNREDLLRKQRTFDNGSIPHQIHLGELHAILRRQEDFYPFLKDNREKIEKILTFRIPYYVGPLARGNSRFAWMTRKSEETITPWNFEEVVDKGASAQSFIERMTNFDKNLPNEKVLPKHSLLYEYFTVYNELTKVKYVTEGMRKPAFLSGEQKKAIVDLLFKTNRKVTVKQLKEDYFKKIECFDSVEISGVEDRFNASLGTYHDLLKIIKDKDFLDNEENEDILEDIVLTLTLFEDREMIEERLKTYAHLFDDKVMKQLKRRRYTGWGRLSRKLINGIRDKQSGKTILDFLKSDGFANRNFMQLIHDDSLTFKEDIQKAQVSGQGDSLHEHIANLAGSPAIKKGILQTVKVVDELVKVMGRHKPENIVIEMARENQTTQKGQKNSRERMKRIEEGIKELGSQILKEHPVENTQLQNEKLYLYYLQNGRDMYVDQELDINRLSDYDVDHIVPQSFLKDDSIDNKVLTRSDKNRGKSDNVPSEEVVKKMKNYWRQLLNAKLITQRKFDNLTKAERGGLSELDKAGFIKRQLVETRQITKHVAQILDSRMNTKYDENDKLIREVKVITLKSKLVSDFRKDFQFYKVREINNYHHAHDAYLNAVVGTALIKKYPKLESEFVYGDYKVYDVRKMIAKSEQEIGKATAKYFFYSNIMNFFKTEITLANGEIRKRPLIETNGETGEIVWDKGRDFATVRKVLSMPQVNIVKKTEVQTGGFSKESILPKRNSDKLIARKKDWDPKKYGGFDSPTVAYSVLVVAKVEKGKSKKLKSVKELLGITIMERSSFEKNPIDFLEAKGYKEVKKDLIIKLPKYSLFELENGRKRMLASAGELQKGNELALPSKYVNFLYLASHYEKLKGSPEDNEQKQLFVEQHKHYLDEIIEQISEFSKRVILADANLDKVLSAYNKHRDKPIREQAENIIHLFTLTNLGAPAAFKYFDTTIDRKRYTSTKEVLDATLIHQSITGLYETRIDLSQLGGDSGGSKRTADGSEFEPKKKRKVGGGGSGATNFSLLKQAGDVEENPGPMVSKGEELFTGVVPILVELDGDVNGHKFSVSGEGEGDATYGKLTLKFICTTGKLPVPWPTLVTTLTYGVQCFSRYPDHMKQHDFFKSAMPEGYVQERTIFFKDDGNYKTRAEVKFEGDTLVNRIELKGIDFKEDGNILGHKLEYNYNSHNVYIMADKQKNGIKVNFKIRHNIEDGSVQLADHYQQNTPIGDGPVLLPDNHYLSTQSALSKDPNEKRDHMVLLEFVTAAGITLGMDELYK

SEQ ID NO: 165 - protein, 2089 aa, Artificial Sequence
  Description of Artificial Sequence: Synthetic polypeptide
MEASPASGPRHLMDPHIFTSNFNNGIGRHKTYLCYEVERLDNGTSVKMDQHRGFLHNQAKNLLCGFYGRHAELRFLDLVPSLQLDPAQIYRVTWFISWSPCFSWGCAGEVRAFLQENTHVRLRIFAARIYDYDPLYKEALQMLRDAGAQVSIMTYDEFKHCWDTFVDHQGCPFQPWDGLDEHSQALSGRLRAILQNQGNSGSETPGTSESATPESDKKYSIGLAIGTNSVGWAVITDEYKVPSKKFKVLGNTDRHSIKKNLIGALLFDSGETAEATRLKRTARRRYTRRKNRICYLQEIFSNEMAKVDDSFFHRLEESFLVEEDKKHERHPIFGNIVDEVAYHEKYPTIYHLRKKLVDSTDKADLRLIYLALAHMIKFRGHFLIEGDLNPDNSDVDKLFIQLVQTYNQLFEENPINASGVDAKAILSARLSKSRRLENLIAQLPGEKKNGLFGNLIALSLGLTPNFKSNFDLAEDAKLQLSKDTYDDDLDNLLAQIGDQYADLFLAAKNLSDAILLSDILRVNTEITKAPLSASMIKRYDEHHQDLTLLKALVRQQLPEKYKEIFFDQSKNGYAGYIDGGASQEEFYKFIKPILEKMDGTEELLVKLNREDLLRKQRTFDNGSIPHQIHLGELHAILRRQEDFYPFLKDNREKIEKILTFRIPYYVGPLARGNSRFAWMTRKSEETITPWNFEEVVDKGASAQSFIERMTNFDKNLPNEKVLPKHSLLYEYFTVYNELTKVKYVTEGMRKPAFLSGEQKKAIVDLLFKTNRKVTVKQLKEDYFKKIECFDSVEISGVEDRFNASLGTYHDLLKIIKDKDFLDNEENEDILEDIVLTLTLFEDREMIEERLKTYAHLFDDKVMKQLKRRRYTGWGRLSRKLINGIRDKQSGKTILDFLKSDGFANRNFMQLIHDDSLTFKEDIQKAQVSGQGDSLHEHIANLAGSPAIKKGILQTVKVVDELVKVMGRHKPENIVIEMARENQTTQKGQKNSRERMKRIEEGIKELGSQILKEHPVENTQLQNEKLYLYYLQNGRDMYVDQELDINRLSDYDVDHIVPQSFLKDDSIDNKVLTRSDKNRGKSDNVPSEEVVKKMKNYWRQLLNAKLITQRKFDNLTKAERGGLSELDKAGFIKRQLVETRQITKHVAQILDSRMNTKYDENDKLIREVKVITLKSKLVSDFRKDFQFYKVREINNYHHAHDAYLNAVVGTALIKKYPKLESEFVYGDYKVYDVRKMIAKSEQEIGKATAKYFFYSNIMNFFKTEITLANGEIRKRPLIETNGETGEIVWDKGRDFATVRKVLSMPQVNIVKKTEVQTGGFSKESILPKRNSDKLIARKKDWDPKKYGGFDSPTVAYSVLVVAKVEKGKSKKLKSVKELLGITIMERSSFEKNPIDFLEAKGYKEVKKDLIIKLPKYSLFELENGRKRMLASAGELQKGNELALPSKYVNFLYLASHYEKLKGSPEDNEQKQLFVEQHKHYLDEIIEQISEFSKRVILADANLDKVLSAYNKHRDKPIREQAENIIHLFTLTNLGAPAAFKYFDTTIDRKRYTSTKEVLDATLIHQSITGLYETRIDLSQLGGDSGGSANELTWHDVLAEEKQQPYFLNTLQTVASERQSGVTIYPPQKDVFNAFRFTELGDVKVVILGQDPYHGPGQAHGLAFSVRPGIAIPPSLLNMYKELENTIPGFTRPNHGYLESWARQGVLLLNTVLTVRAGQAHSHASLGWETFTDKVISLINQHREGVVFLLWGSHAQKKGAIIDKQRHHVLKAPHPSPLSAHRGFFGCNHFVLANQWLEQRGETPIDWMPVLPAESESGGSPKKKRKVGGGGSGATNFSLLKQAGDVEENPGPMVSKGEELFTGVVPILVELDGDVNGHKFSVSGEGEGDATYGKLTLKFICTTGKLPVPWPTLVTTLTYGVQCFSRYPDHMKQHDFFKSAMPEGYVQERTIFFKDDGNYKTRAEVKFEGDTLVNRIELKGIDFKEDGNILGHKLEYNYNSHNVYIMADKQKNGIKVNFKIRHNIEDGSVQLADHYQQNTPIGDGPVLLPDNHYLSTQSALSKDPNEKRDHMVLLEFVTAAGITLGMDELYK

SEQ ID NO: 166 - protein, 2089 aa, Artificial Sequence
  Description of Artificial Sequence: Synthetic polypeptide
MEASPASGPRHLMDPHIFTSNFNNGIGRHKTYLCYEVERLDNGTSVKMDQHRGFLHGQAKNLLCGFYGRHAELRFLDLVPSLQLDPAQIYRVTWFISWSPCFSWGCAGEVRAFLQENTHVRLRIFAARIYDYDPLYKEALQMLRDAGAQVSIMTYDEFKHCWDTFVDHQGCPFQPWDGLDEHSQALSGRLRAILQNQGNSGSETPGTSESATPESDKKYSIGLAIGTNSVGWAVITDEYKVPSKKFKVLGNTDRHSIKKNLIGALLFDSGETAEATRLKRTARRRYTRRKNRICYLQEIFSNEMAKVDDSFFHRLEESFLVEEDKKHERHPIFGNIVDEVAYHEKYPTIYHLRKKLVDSTDKADLRLIYLALAHMIKFRGHFLIEGDLNPDNSDVDKLFIQLVQTYNQLFEENPINASGVDAKAILSARLSKSRRLENLIAQLPGEKKNGLFGNLIALSLGLTPNFKSNFDLAEDAKLQLSKDTYDDDLDNLLAQIGDQYADLFLAAKNLSDAILLSDILRVNTEITKAPLSASMIKRYDEHHQDLTLLKALVRQQLPEKYKEIFFDQSKNGYAGYIDGGASQEEFYKFIKPILEKMDGTEELLVKLNREDLLRKQRTFDNGSIPHQIHLGELHAILRRQEDFYPFLKDNREKIEKILTFRIPYYVGPLARGNSRFAWMTRKSEETITPWNFEEVVDKGASAQSFIERMTNFDKNLPNEKVLPKHSLLYEYFTVYNELTKVKYVTEGMRKPAFLSGEQKKAIVDLLFKTNRKVTVKQLKEDYFKKIECFDSVEISGVEDRFNASLGTYHDLLKIIKDKDFLDNEENEDILEDIVLTLTLFEDREMIEERLKTYAHLFDDKVMKQLKRRRYTGWGRLSRKLINGIRDKQSGKTILDFLKSDGFANRNFMQLIHDDSLTFKEDIQKAQVSGQGDSLHEHIANLAGSPAIKKGILQTVKVVDELVKVMGRHKPENIVIEMARENQTTQKGQKNSRERMKRIEEGIKELGSQILKEHPVENTQLQNEKLYLYYLQNGRDMYVDQELDINRLSDYDVDHIVPQSFLKDDSIDNKVLTRSDKNRGKSDNVPSEEVVKKMKNYWRQLLNAKLITQRKFDNLTKAERGGLSELDKAGFIKRQLVETRQITKHVAQILDSRMNTKYDENDKLIREVKVITLKSKLVSDFRKDFQFYKVREINNYHHAHDAYLNAVVGTALIKKYPKLESEFVYGDYKVYDVRKMIAKSEQEIGKATAKYFFYSNIMNFFKTEITLANGEIRKRPLIETNGETGEIVWDKGRDFATVRKVLSMPQVNIVKKTEVQTGGFSKESILPKRNSDKLIARKKDWDPKKYGGFDSPTVAYSVLVVAKVEKGKSKKLKSVKELLGITIMERSSFEKNPIDFLEAKGYKEVKKDLIIKLPKYSLFELENGRKRMLASAGELQKGNELALPSKYVNFLYLASHYEKLKGSPEDNEQKQLFVEQHKHYLDEIIEQISEFSKRVILADANLDKVLSAYNKHRDKPIREQAENIIHLFTLTNLGAPAAFKYFDTTIDRKRYTSTKEVLDATLIHQSITGLYETRIDLSQLGGDSGGSANELTWHDVLAEEKQQPYFLNTLQTVASERQSGVTIYPPQKDVFNAFRFTELGDVKVVILGQDPYHGPGQAHGLAFSVRPGIAIPPSLLNMYKELENTIPGFTRPNHGYLESWARQGVLLLNTVLTVRAGQAHSHASLGWETFTDKVISLINQHREGVVFLLWGSHAQKKGAIIDKQRHHVLKAPHPSPLSAHRGFFGCNHFVLANQWLEQRGETPIDWMPVLPAESESGGSPKKKRKVGGGGSGATNFSLLKQAGDVEENPGPMVSKGEELFTGVVPILVELDGDVNGHKFSVSGEGEGDATYGKLTLKFICTTGKLPVPWPTLVTTLTYGVQCFSRYPDHMKQHDFFKSAMPEGYVQERTIFFKDDGNYKTRAEVKFEGDTLVNRIELKGIDFKEDGNILGHKLEYNYNSHNVYIMADKQKNGIKVNFKIRHNIEDGSVQLADHYQQNTPIGDGPVLLPDNHYLSTQSALSKDPNEKRDHMVLLEFVTAAGITLGMDELYK

SEQ ID NO: 167 - protein, 2088 aa, Artificial Sequence
  Description of Artificial Sequence: Synthetic polypeptide
MDSLLMNRRKFLYQFKNVRWAKGRRETYLCYVVKRRDSATSFSLDFGYLRNKNGCHVELLFLRYISDWDLDPGRCYRVTWFTSWSPCYDCARHVADFLRGNPNLSLRIFTARLYFCEDRKAEPEGLRRLHRAGVQIAIMTFKDYFYCWNTFVENHERTFKAWEGLHENSVRLSRQLRRILLPLYEVDDLRDAFRTLGLSGSETPGTSESATPESDKKYSIGLAIGTNSVGWAVITDEYKVPSKKFKVLGNTDRHSIKKNLIGALLFDSGETAEATRLKRTARRRYTRRKNRICYLQEIFSNEMAKVDDSFFHRLEESFLVEEDKKHERHPIFGNIVDEVAYHEKYPTIYHLRKKLVDSTDKADLRLIYLALAHMIKFRGHFLIEGDLNPDNSDVDKLFIQLVQTYNQLFEENPINASGVDAKAILSARLSKSRRLENLIAQLPGEKKNGLFGNLIALSLGLTPNFKSNFDLAEDAKLQLSKDTYDDDLDNLLAQIGDQYADLFLAAKNLSDAILLSDILRVNTEITKAPLSASMIKRYDEHHQDLTLLKALVRQQLPEKYKEIFFDQSKNGYAGYIDGGASQEEFYKFIKPILEKMDGTEELLVKLNREDLLRKQRTFDNGSIPHQIHLGELHAILRRQEDFYPFLKDNREKIEKILTFRIPYYVGPLARGNSRFAWMTRKSEETITPWNFEEVVDKGASAQSFIERMTNFDKNLPNEKVLPKHSLLYEYFTVYNELTKVKYVTEGMRKPAFLSGEQKKAIVDLLFKTNRKVTVKQLKEDYFKKIECFDSVEISGVEDRFNASLGTYHDLLKIIKDKDFLDNEENEDILEDIVLTLTLFEDREMIEERLKTYAHLFDDKVMKQLKRRRYTGWGRLSRKLINGIRDKQSGKTILDFLKSDGFANRNFMQLIHDDSLTFKEDIQKAQVSGQGDSLHEHIANLAGSPAIKKGILQTVKVVDELVKVMGRHKPENIVIEMARENQTTQKGQKNSRERMKRIEEGIKELGSQILKEHPVENTQLQNEKLYLYYLQNGRDMYVDQELDINRLSDYDVDHIVPQSFLKDDSIDNKVLTRSDKNRGKSDNVPSEEVVKKMKNYWRQLLNAKLITQRKFDNLTKAERGGLSELDKAGFIKRQLVETRQITKHVAQILDSRMNTKYDENDKLIREVKVITLKSKLVSDFRKDFQFYKVREINNYHHAHDAYLNAVVGTALIKKYPKLESEFVYGDYKVYDVRKMIAKSEQEIGKATAKYFFYSNIMNFFKTEITLANGEIRKRPLIETNGETGEIVWDKGRDFATVRKVLSMPQVNIVKKTEVQTGGFSKESILPKRNSDKLIARKKDWDPKKYGGFDSPTVAYSVLVVAKVEKGKSKKLKSVKELLGITIMERSSFEKNPIDFLEAKGYKEVKKDLIIKLPKYSLFELENGRKRMLASAGELQKGNELALPSKYVNFLYLASHYEKLKGSPEDNEQKQLFVEQHKHYLDEIIEQISEFSKRVILADANLDKVLSAYNKHRDKPIREQAENIIHLFTLTNLGAPAAFKYFDTTIDRKRYTSTKEVLDATLIHQSITGLYETRIDLSQLGGDSGGSANELTWHDVLAEEKQQPYFLNTLQTVASERQSGVTIYPPQKDVFNAFRFTELGDVKVVILGQDPYHGPGQAHGLAFSVRPGIAIPPSLLNMYKELENTIPGFTRPNHGYLESWARQGVLLLNTVLTVRAGQAHSHASLGWETFTDKVISLINQHREGVVFLLWGSHAQKKGAIIDKQRHHVLKAPHPSPLSAHRGFFGCNHFVLANQWLEQRGETPIDWMPVLPAESESGGSPKKKRKVGGGGSGATNFSLLKQAGDVEENPGPMVSKGEELFTGVVPILVELDGDVNGHKFSVSGEGEGDATYGKLTLKFICTTGKLPVPWPTLVTTLTYGVQCFSRYPDHMKQHDFFKSAMPEGYVQERTIFFKDDGNYKTRAEVKFEGDTLVNRIELKGIDFKEDGNILGHKLEYNYNSHNVYIMADKQKNGIKVNFKIRHNIEDGSVQLADHYQQNTPIGDGPVLLPDNHYLSTQSALSKDPNEKRDHMVLLEFVTAAGITLGMDELYK

SEQ ID NO: 168 - protein, 1875 aa, Artificial Sequence
  Description of Artificial Sequence: Synthetic polypeptide
MDKKYSIGLAIGTNSVGWAVITDEYKVPSKKFKVLGNTDRHSIKKNLIGALLFDSGETAEATRLKRTARRRYTRRKNRICYLQEIFSNEMAKVDDSFFHRLEESFLVEEDKKHERHPIFGNIVDEVAYHEKYPTIYHLRKKLVDSTDKADLRLIYLALAHMIKFRGHFLIEGDLNPDNSDVDKLFIQLVQTYNQLFEENPINASGVDAKAILSARLSKSRRLENLIAQLPGEKKNGLFGNLIALSLGLTPNFKSNFDLAEDAKLQLSKDTYDDDLDNLLAQIGDQYADLFLAAKNLSDAILLSDILRVNTEITKAPLSASMIKRYDEHHQDLTLLKALVRQQLPEKYKEIFFDQSKNGYAGYIDGGASQEEFYKFIKPILEKMDGTEELLVKLNREDLLRKQRTFDNGSIPHQIHLGELHAILRRQEDFYPFLKDNREKIEKILTFRIPYYVGPLARGNSRFAWMTRKSEETITPWNFEEVVDKGASAQSFIERMTNFDKNLPNEKVLPKHSLLYEYFTVYNELTKVKYVTEGMRKPAFLSGEQKKAIVDLLFKTNRKVTVKQLKEDYFKKIECFDSVEISGVEDRFNASLGTYHDLLKIIKDKDFLDNEENEDILEDIVLTLTLFEDREMIEERLKTYAHLFDDKVMKQLKRRRYTGWGRLSRKLINGIRDKQSGKTILDFLKSDGFANRNFMQLIHDDSLTFKEDIQKAQVSGQGDSLHEHIANLAGSPAIKKGILQTVKVVDELVKVMGRHKPENIVIEMARENQTTQKGQKNSRERMKRIEEGIKELGSQILKEHPVENTQLQNEKLYLYYLQNGRDMYVDQELDINRLSDYDVDHIVPQSFLKDDSIDNKVLTRSDKNRGKSDNVPSEEVVKKMKNYWRQLLNAKLITQRKFDNLTKAERGGLSELDKAGFIKRQLVETRQITKHVAQILDSRMNTKYDENDKLIREVKVITLKSKLVSDFRKDFQFYKVREINNYHHAHDAYLNAVVGTALIKKYPKLESEFVYGDYKVYDVRKMIAKSEQEIGKATAKYFFYSNIMNFFKTEITLANGEIRKRPLIETNGETGEIVWDKGRDFATVRKVLSMPQVNIVKKTEVQTGGFSKESILPKRNSDKLIARKKDWDPKKYGGFDSPTVAYSVLVVAKVEKGKSKKLKSVKELLGITIMERSSFEKNPIDFLEAKGYKEVKKDLIIKLPKYSLFELENGRKRMLASAGELQKGNELALPSKYVNFLYLASHYEKLKGSPEDNEQKQLFVEQHKHYLDEIIEQISEFSKRVILADANLDKVLSAYNKHRDKPIREQAENIIHLFTLTNLGAPAAFKYFDTTIDRKRYTSTKEVLDATLIHQSITGLYETRIDLSQLGGDSGGSANELTWHDVLAEEKQQPYFLNTLQTVASERQSGVTIYPPQKDVFNAFRFTELGDVKVVILGQDPYHGPGQAHGLAFSVRPGIAIPPSLLNMYKELENTIPGFTRPNHGYLESWARQGVLLLNTVLTVRAGQAHSHASLGWETFTDKVISLINQHREGVVFLLWGSHAQKKGAIIDKQRHHVLKAPHPSPLSAHRGFFGCNHFVLANQWLEQRGETPIDWMPVLPAESESGGSPKKKRKVGGGGSGATNFSLLKQAGDVEENPGPMVSKGEELFTGVVPILVELDGDVNGHKFSVSGEGEGDATYGKLTLKFICTTGKLPVPWPTLVTTLTYGVQCFSRYPDHMKQHDFFKSAMPEGYVQERTIFFKDDGNYKTRAEVKFEGDTLVNRIELKGIDFKEDGNILGHKLEYNYNSHNVYIMADKQKNGIKVNFKIRHNIEDGSVQLADHYQQNTPIGDGPVLLPDNHYLSTQSALSKDPNEKRDHMVLLEFVTAAGITLGMDELYK

SEQ ID NO: 169 - protein, 2199 aa, Artificial Sequence
  Description of Artificial Sequence: Synthetic polypeptide
MAPKKKRKVGIHGVPAAMDKKYSIGLAIGTNSVGWAVITDEYKVPSKKFKVLGNTDRHSIKKNLIGALLFDSGETAEATRLKRTARRRYTRRKNRICYLQEIFSNEMAKVDDSFFHRLEESFLVEEDKKHERHPIFGNIVDEVAYHEKYPTIYHLRKKLVDSTDKADLRLIYLALAHMIKFRGHFLIEGDLNPDNSDVDKLFIQLVQTYNQLFEENPINASGVDAKAILSARLSKSRRLENLIAQLPGEKKNGLFGNLIALSLGLTPNFKSNFDLAEDAKLQLSKDTYDDDLDNLLAQIGDQYADLFLAAKNLSDAILLSDILRVNTEITKAPLSASMIKRYDEHHQDLTLLKALVRQQLPEKYKEIFFDQSKNGYAGYIDGGASQEEFYKFIKPILEKMDGTEELLVKLNREDLLRKQRTFDNGSIPHQIHLGELHAILRRQEDFYPFLKDNREKIEKILTFRIPYYVGPLARGNSRFAWMTRKSEETITPWNFEEVVDKGASAQSFIERMTNFDKNLPNEKVLPKHSLLYEYFTVYNELTKVKYVTEGMRKPAFLSGEQKKAIVDLLFKTNRKVTVKQLKEDYFKKIECFDSVEISGVEDRFNASLGTYHDLLKIIKDKDFLDNEENEDILEDIVLTLTLFEDREMIEERLKTYAHLFDDKVMKQLKRRRYTGWGRLSRKLINGIRDKQSGKTILDFLKSDGFANRNFMQLIHDDSLTFKEDIQKAQVSGQGDSLHEHIANLAGSPAIKKGILQTVKVVDELVKVMGRHKPENIVIEMARENQTTQKGQKNSRERMKRIEEGIKELGSQILKEHPVENTQLQNEKLYLYYLQNGRDMYVDQELDINRLSDYDVDHIVPQSFLKDDSIDNKVLTRSDKNRGKSDNVPSEEVVKKMKNYWRQLLNAKLITQRKFDNLTKAERGGLSELDKAGFIKRQLVETRQITKHVAQILDSRMNTKYDENDKLIREVKVITLKSKLVSDFRKDFQFYKVREINNYHHAHDAYLNAVVGTALIKKYPKLESEFVYGDYKVYDVRKMIAKSEQEIGKATAKYFFYSNIMNFFKTEITLANGEIRKRPLIETNGETGEIVWDKGRDFATVRKVLSMPQVNIVKKTEVQTGGFSKESILPKRNSDKLIARKKDWDPKKYGGFDSPTVAYSVLVVAKVEKGKSKKLKSVKELLGITIMERSSFEKNPIDFLEAKGYKEVKKDLIIKLPKYSLFELENGRKRMLASAGELQKGNELALPSKYVNFLYLASHYEKLKGSPEDNEQKQLFVEQHKHYLDEIIEQISEFSKRVILADANLDKVLSAYNKHRDKPIREQAENIIHLFTLTNLGAPAAFKYFDTTIDRKRYTSTKEVLDATLIHQSITGLYETRIDLSQLGGDSRADPKKKRKVGGGGTGGGGSAEYVRALFDFNGNDEEDLPFKKGDILRIRDKPEEQWWNAEDSEGKRGMILVPYVEKYSGDYKDHDGDYKDHDIDYKDDDDKSGMTDAEYVRIHEKLDIYTFKKQFFNNKKSVSHRCYVLFELKRRGERRACFWGYAVNKPQSGTERGIHAEIFSIRKVEEYLRDNPGQFTINWYSSWSPCADCAEKILEWYNQELRGNGHTLKIWACKLYYEKNARNQIGLWNLRDNGVGLNVMVSEHYQCCRKIFIQSSHNQLNENRWLEKTLKRAEKWRSELSIMIQVKILHTTKSPAVGPKKKRKVGTANELTWHDVLAEEKQQPYFLNTLQTVASERQSGVTIYPPQKDVFNAFRFTELGDVKVVILGQDPYHGPGQAHGLAFSVRPGIAIPPSLLNMYKELENTIPGFTRPNHGYLESWARQGVLLLNTVLTVRAGQAHSHASLGWETFTDKVISLINQHREGVVFLLWGSHAQKKGAIIDKQRHHVLKAPHPSPLSAHRGFFGCNHFVLANQWLEQRGETPIDWMPVLPAESEGGGGSGATNFSLLKQAGDVEENPGPMVSKGEELFTGVVPILVELDGDVNGHKFSVSGEGEGDATYGKLTLKFICTTGKLPVPWPTLVTTLTYGVQCFSRYPDHMKQHDFFKSAMPEGYVQERTIFFKDDGNYKTRAEVKFEGDTLVNRIELKGIDFKEDGNILGHKLEYNYNSHNVYIMADKQKNGIKVNFKIRHNIEDGSVQLADHYQQNTPIGDGPVLLPDNHYLSTQSALSKDPNEKRDHMVLLEFVTAAGITLGMDELYK

SEQ ID NO: 170 - protein, 1991 aa, Artificial Sequence
  Description of Artificial Sequence: Synthetic polypeptide
MAPKKKRKVGIHGVPAAMDKKYSIGLAIGTNSVGWAVITDEYKVPSKKFKVLGNTDRHSIKKNLIGALLFDSGETAEATRLKRTARRRYTRRKNRICYLQEIFSNEMAKVDDSFFHRLEESFLVEEDKKHERHPIFGNIVDEVAYHEKYPTIYHLRKKLVDSTDKADLRLIYLALAHMIKFRGHFLIEGDLNPDNSDVDKLFIQLVQTYNQLFEENPINASGVDAKAILSARLSKSRRLENLIAQLPGEKKNGLFGNLIALSLGLTPNFKSNFDLAEDAKLQLSKDTYDDDLDNLLAQIGDQYADLFLAAKNLSDAILLSDILRVNTEITKAPLSASMIKRYDEHHQDLTLLKALVRQQLPEKYKEIFFDQSKNGYAGYIDGGASQEEFYKFIKPILEKMDGTEELLVKLNREDLLRKQRTFDNGSIPHQIHLGELHAILRRQEDFYPFLKDNREKIEKILTFRIPYYVGPLARGNSRFAWMTRKSEETITPWNFEEVVDKGASAQSFIERMTNFDKNLPNEKVLPKHSLLYEYFTVYNELTKVKYVTEGMRKPAFLSGEQKKAIVDLLFKTNRKVTVKQLKEDYFKKIECFDSVEISGVEDRFNASLGTYHDLLKIIKDKDFLDNEENEDILEDIVLTLTLFEDREMIEERLKTYAHLFDDKVMKQLKRRRYTGWGRLSRKLINGIRDKQSGKTILDFLKSDGFANRNFMQLIHDDSLTFKEDIQKAQVSGQGDSLHEHIANLAGSPAIKKGILQTVKVVDELVKVMGRHKPENIVIEMARENQTTQKGQKNSRERMKRIEEGIKELGSQILKEHPVENTQLQNEKLYLYYLQNGRDMYVDQELDINRLSDYDVDHIVPQSFLKDDSIDNKVLTRSDKNRGKSDNVPSEEVVKKMKNYWRQLLNAKLITQRKFDNLTKAERGGLSELDKAGFIKRQLVETRQITKHVAQILDSRMNTKYDENDKLIREVKVITLKSKLVSDFRKDFQFYKVREINNYHHAHDAYLNAVVGTALIKKYPKLESEFVYGDYKVYDVRKMIAKSEQEIGKATAKYFFYSNIMNFFKTEITLANGEIRKRPLIETNGETGEIVWDKGRDFATVRKVLSMPQVNIVKKTEVQTGGFSKESILPKRNSDKLIARKKDWDPKKYGGFDSPTVAYSVLVVAKVEKGKSKKLKSVKELLGITIMERSSFEKNPIDFLEAKGYKEVKKDLIIKLPKYSLFELENGRKRMLASAGELQKGNELALPSKYVNFLYLASHYEKLKGSPEDNEQKQLFVEQHKHYLDEIIEQISEFSKRVILADANLDKVLSAYNKHRDKPIREQAENIIHLFTLTNLGAPAAFKYFDTTIDRKRYTSTKEVLDATLIHQSITGLYETRIDLSQLGGDSRADPKKKRKVGGGGTGGGGSAEYVRALFDFNGNDEEDLPFKKGDILRIRDKPEEQWWNAEDSEGKRGMILVPYVEKYSGDYKDHDGDYKDHDIDYKDDDDKSGGPKKKRKVGTANELTWHDVLAEEKQQPYFLNTLQTVASERQSGVTIYPPQKDVFNAFRFTELGDVKVVILGQDPYHGPGQAHGLAFSVRPGIAIPPSLLNMYKELENTIPGFTRPNHGYLESWARQGVLLLNTVLTVRAGQAHSHASLGWETFTDKVISLINQHREGVVFLLWGSHAQKKGAIIDKQRHHVLKAPHPSPLSAHRGFFGCNHFVLANQWLEQRGETPIDWMPVLPAESEGGGGSGATNFSLLKQAGDVEENPGPMVSKGEELFTGVVPILVELDGDVNGHKFSVSGEGEGDATYGKLTLKFICTTGKLPVPWPTLVTTLTYGVQCFSRYPDHMKQHDFFKSAMPEGYVQERTIFFKDDGNYKTRAEVKFEGDTLVNRIELKGIDFKEDGNILGHKLEYNYNSHNVYIMADKQKNGIKVNFKIRHNIEDGSVQLADHYQQNTPIGDGPVLLPDNHYLSTQSALSKDPNEKRDHMVLLEFVTAAGITLGMDELYK

SEQ ID NO: 171 - protein, 2173 aa, Artificial Sequence
  Description of Artificial Sequence: Synthetic polypeptide
MEASPASGPRHLMDPHIFTSNFNNGIGRHKTYLCYEVERLDNGTSVKMDQHRGFLHNQAKNLLCGFYGRHAELRFLDLVPSLQLDPAQIYRVTWFISWSPCFSWGCAGEVRAFLQENTHVRLRIFAARIYDYDPLYKEALQMLRDAGAQVSIMTYDEFKHCWDTFVDHQGCPFQPWDGLDEHSQALSGRLRAILQNQGNSGSETPGTSESATPESDKKYSIGLAIGTNSVGWAVITDEYKVPSKKFKVLGNTDRHSIKKNLIGALLFDSGETAEATRLKRTARRRYTRRKNRICYLQEIFSNEMAKVDDSFFHRLEESFLVEEDKKHERHPIFGNIVDEVAYHEKYPTIYHLRKKLVDSTDKADLRLIYLALAHMIKFRGHFLIEGDLNPDNSDVDKLFIQLVQTYNQLFEENPINASGVDAKAILSARLSKSRRLENLIAQLPGEKKNGLFGNLIALSLGLTPNFKSNFDLAEDAKLQLSKDTYDDDLDNLLAQIGDQYADLFLAAKNLSDAILLSDILRVNTEITKAPLSASMIKRYDEHHQDLTLLKALVRQQLPEKYKEIFFDQSKNGYAGYIDGGASQEEFYKFIKPILEKMDGTEELLVKLNREDLLRKQRTFDNGSIPHQIHLGELHAILRRQEDFYPFLKDNREKIEKILTFRIPYYVGPLARGNSRFAWMTRKSEETITPWNFEEVVDKGASAQSFIERMTNFDKNLPNEKVLPKHSLLYEYFTVYNELTKVKYVTEGMRKPAFLSGEQKKAIVDLLFKTNRKVTVKQLKEDYFKKIECFDSVEISGVEDRFNASLGTYHDLLKIIKDKDFLDNEENEDILEDIVLTLTLFEDREMIEERLKTYAHLFDDKVMKQLKRRRYTGWGRLSRKLINGIRDKQSGKTILDFLKSDGFANRNFMQLIHDDSLTFKEDIQKAQVSGQGDSLHEHIANLAGSPAIKKGILQTVKVVDELVKVMGRHKPENIVIEMARENQTTQKGQKNSRERMKRIEEGIKELGSQILKEHPVENTQLQNEKLYLYYLQNGRDMYVDQELDINRLSDYDVDHIVPQSFLKDDSIDNKVLTRSDKNRGKSDNVPSEEVVKKMKNYWRQLLNAKLITQRKFDNLTKAERGGLSELDKAGFIKRQLVETRQITKHVAQILDSRMNTKYDENDKLIREVKVITLKSKLVSDFRKDFQFYKVREINNYHHAHDAYLNAVVGTALIKKYPKLESEFVYGDYKVYDVRKMIAKSEQEIGKATAKYFFYSNIMNFFKTEITLANGEIRKRPLIETNGETGEIVWDKGRDFATVRKVLSMPQVNIVKKTEVQTGGFSKESILPKRNSDKLIARKKDWDPKKYGGFDSPTVAYSVLVVAKVEKGKSKKLKSVKELLGITIMERSSFEKNPIDFLEAKGYKEVKKDLIIKLPKYSLFELENGRKRMLASAGELQKGNELALPSKYVNFLYLASHYEKLKGSPEDNEQKQLFVEQHKHYLDEIIEQISEFSKRVILADANLDKVLSAYNKHRDKPIREQAENIIHLFTLTNLGAPAAFKYFDTTIDRKRYTSTKEVLDATLIHQSITGLYETRIDLSQLGGDSGGSIGQKTLYSFFSPSPARKRHAPSPEPAVQGTGVAGVPEESGDAAAIPAKKAPAGQEEPGTPPSSPLSAEQLDRIQRNKAAALLRLAARNVPVGFGESWKKHLSGEFGKPYFIKLMGFVAEERKHYTVYPPPHQVFTWTQMCDIKDVKVVILGQDPYHGPNQAHGLCFSVQRPVPPPPSLENIYKELSTDIEDFVHPGHGDLSGWAKQGVLLLNAVLTVRAHQANSHKERGWEQFTDAVVSWLNQNSNGLVFLLWGSYAQKKGSAIDRKRHHVLQTAHPSPLSVYRGFFGCRHFSKTNELLQKSGKKPIDWKELSGGSPKKKRKVGGGGSGATNFSLLKQAGDVEENPGPMVSKGEELFTGVVPILVELDGDVNGHKFSVSGEGEGDATYGKLTLKFICTTGKLPVPWPTLVTTLTYGVQCFSRYPDHMKQHDFFKSAMPEGYVQERTIFFKDDGNYKTRAEVKFEGDTLVNRIELKGIDFKEDGNILGHKLEYNYNSHNVYIMADKQKNGIKVNFKIRHNIEDGSVQLADHYQQNTPIGDGPVLLPDNHYLSTQSALSKDPNEKRDHMVLLEFVTAAGITLGMDELYK

SEQ ID NO: 172 - protein, 2173 aa, Artificial Sequence
  Description of Artificial Sequence: Synthetic polypeptide
MEASPASGPRHLMDPHIFTSNFNNGIGRHKTYLCYEVERLDNGTSVKMDQHRGFLHGQAKNLLCGFYGRHAELRFLDLVPSLQLDPAQIYRVTWFISWSPCFSWGCAGEVRAFLQENTHVRLRIFAARIYDYDPLYKEALQMLRDAGAQVSIMTYDEFKHCWDTFVDHQGCPFQPWDGLDEHSQALSGRLRAILQNQGNSGSETPGTSESATPESDKKYSIGLAIGTNSVGWAVITDEYKVPSKKFKVLGNTDRHSIKKNLIGALLFDSGETAEATRLKRTARRRYTRRKNRICYLQEIFSNEMAKVDDSFFHRLEESFLVEEDKKHERHPIFGNIVDEVAYHEKYPTIYHLRKKLVDSTDKADLRLIYLALAHMIKFRGHFLIEGDLNPDNSDVDKLFIQLVQTYNQLFEENPINASGVDAKAILSARLSKSRRLENLIAQLPGEKKNGLFGNLIALSLGLTPNFKSNFDLAEDAKLQLSKDTYDDDLDNLLAQIGDQYADLFLAAKNLSDAILLSDILRVNTEITKAPLSASMIKRYDEHHQDLTLLKALVRQQLPEKYKEIFFDQSKNGYAGYIDGGASQEEFYKFIKPILEKMDGTEELLVKLNREDLLRKQRTFDNGSIPHQIHLGELHAILRRQEDFYPFLKDNREKIEKILTFRIPYYVGPLARGNSRFAWMTRKSEETITPWNFEEVVDKGASAQSFIERMTNFDKNLPNEKVLPKHSLLYEYFTVYNELTKVKYVTEGMRKPAFLSGEQKKAIVDLLFKTNRKVTVKQLKEDYFKKIECFDSVEISGVEDRFNASLGTYHDLLKIIKDKDFLDNEENEDILEDIVLTLTLFEDREMIEERLKTYAHLFDDKVMKQLKRRRYTGWGRLSRKLINGIRDKQSGKTILDFLKSDGFANRNFMQLIHDDSLTFKEDIQKAQVSGQGDSLHEHIANLAGSPAIKKGILQTVKVVDELVKVMGRHKPENIVIEMARENQTTQKGQKNSRERMKRIEEGIKELGSQILKEHPVENTQLQNEKLYLYYLQNGRDMYVDQELDINRLSDYDVDHIVPQSFLKDDSIDNKVLTRSDKNRGKSDNVPSEEVVKKMKNYWRQLLNAKLITQRKFDNLTKAERGGLSELDKAGFIKRQLVETRQITKHVAQILDSRMNTKYDENDKLIREVKVITLKSKLVSDFRKDFQFYKVREINNYHHAHDAYLNAVVGTALIKKYPKLESEFVYGDYKVYDVRKMIAKSEQEIGKATAKYFFYSNIMNFFKTEITLANGEIRKRPLIETNGETGEIVWDKGRDFATVRKVLSMPQVNIVKKTEVQTGGFSKESILPKRNSDKLIARKKDWDPKKYGGFDSPTVAYSVLVVAKVEKGKSKKLKSVKELLGITIMERSSFEKNPIDFLEAKGYKEVKKDLIIKLPKYSLFELENGRKRMLASAGELQKGNELALPSKYVNFLYLASHYEKLKGSPEDNEQKQLFVEQHKHYLDEIIEQISEFSKRVILADANLDKVLSAYNKHRDKPIREQAENIIHLFTLTNLGAPAAFKYFDTTIDRKRYTSTKEVLDATLIHQSITGLYETRIDLSQLGGDSGGSIGQKTLYSFFSPSPARKRHAPSPEPAVQGTGVAGVPEESGDAAAIPAKKAPAGQEEPGTPPSSPLSAEQLDRIQRNKAAALLRLAARNVPVGFGESWKKHLSGEFGKPYFIKLMGFVAEERKHYTVYPPPHQVFTWTQMCDIKDVKVVILGQDPYHGPNQAHGLCFSVQRPVPPPPSLENIYKELSTDIEDFVHPGHGDLSGWAKQGVLLLNAVLTVRAHQANSHKERGWEQFTDAVVSWLNQNSNGLVFLLWGSYAQKKGSAIDRKRHHVLQTAHPSPLSVYRGFFGCRHFSKTNELLQKSGKKPIDWKELSGGSPKKKRKVGGGGSGATNFSLLKQAGDVEENPGPMVSKGEELFTGVVPILVELDGDVNGHKFSVSGEGEGDATYGKLTLKFICTTGKLPVPWPTLVTTLTYGVQCFSRYPDHMKQHDFFKSAMPEGYVQERTIFFKDDGNYKTRAEVKFEGDTLVNRIELKGIDFKEDGNILGHKLEYNYNSHNVYIMADKQKNGIKVNFKIRHNIEDGSVQLADHYQQNTPIGDGPVLLPDNHYLSTQSALSKDPNEKRDHMVLLEFVTAAGITLGMDELYK

SEQ ID NO: 173 - protein, 2172 aa, Artificial Sequence
  Description of Artificial Sequence: Synthetic polypeptide
MDSLLMNRRKFLYQFKNVRWAKGRRETYLCYVVKRRDSATSFSLDFGYLRNKNGCHVELLFLRYISDWDLDPGRCYRVTWFTSWSPCYDCARHVADFLRGNPNLSLRIFTARLYFCEDRKAEPEGLRRLHRAGVQIAIMTFKDYFYCWNTFVENHERTFKAWEGLHENSVRLSRQLRRILLPLYEVDDLRDAFRTLGLSGSETPGTSESATPESDKKYSIGLAIGTNSVGWAVITDEYKVPSKKFKVLGNTDRHSIKKNLIGALLFDSGETAEATRLKRTARRRYTRRKNRICYLQEIFSNEMAKVDDSFFHRLEESFLVEEDKKHERHPIFGNIVDEVAYHEKYPTIYHLRKKLVDSTDKADLRLIYLALAHMIKFRGHFLIEGDLNPDNSDVDKLFIQLVQTYNQLFEENPINASGVDAKAILSARLSKSRRLENLIAQLPGEKKNGLFGNLIALSLGLTPNFKSNFDLAEDAKLQLSKDTYDDDLDNLLAQIGDQYADLFLAAKNLSDAILLSDILRVNTEITKAPLSASMIKRYDEHHQDLTLLKALVRQQLPEKYKEIFFDQSKNGYAGYIDGGASQEEFYKFIKPILEKMDGTEELLVKLNREDLLRKQRTFDNGSIPHQIHLGELHAILRRQEDFYPFLKDNREKIEKILTFRIPYYVGPLARGNSRFAWMTRKSEETITPWNFEEVVDKGASAQSFIERMTNFDKNLPNEKVLPKHSLLYEYFTVYNELTKVKYVTEGMRKPAFLSGEQKKAIVDLLFKTNRKVTVKQLKEDYFKKIECFDSVEISGVEDRFNASLGTYHDLLKIIKDKDFLDNEENEDILEDIVLTLTLFEDREMIEERLKTYAHLFDDKVMKQLKRRRYTGWGRLSRKLINGIRDKQSGKTILDFLKSDGFANRNFMQLIHDDSLTFKEDIQKAQVSGQGDSLHEHIANLAGSPAIKKGILQTVKVVDELVKVMGRHKPENIVIEMARENQTTQKGQKNSRERMKRIEEGIKELGSQILKEHPVENTQLQNEKLYLYYLQNGRDMYVDQELDINRLSDYDVDHIVPQSFLKDDSIDNKVLTRSDKNRGKSDNVPSEEVVKKMKNYWRQLLNAKLITQRKFDNLTKAERGGLSELDKAGFIKRQLVETRQITKHVAQILDSRMNTKYDENDKLIREVKVITLKSKLVSDFRKDFQFYKVREINNYHHAHDAYLNAVVGTALIKKYPKLESEFVYGDYKVYDVRKMIAKSEQEIGKATAKYFFYSNIMNFFKTEITLANGEIRKRPLIETNGETGEIVWDKGRDFATVRKVLSMPQVNIVKKTEVQTGGFSKESILPKRNSDKLIARKKDWDPKKYGGFDSPTVAYSVLVVAKVEKGKSKKLKSVKELLGITIMERSSFEKNPIDFLEAKGYKEVKKDLIIKLPKYSLFELENGRKRMLASAGELQKGNELALPSKYVNFLYLASHYEKLKGSPEDNEQKQLFVEQHKHYLDEIIEQISEFSKRVILADANLDKVLSAYNKHRDKPIREQAENIIHLFTLTNLGAPAAFKYFDTTIDRKRYTSTKEVLDATLIHQSITGLYETRIDLSQLGGDSGGSIGQKTLYSFFSPSPARKRHAPSPEPAVQGTGVAGVPEESGDAAAIPAKKAPAGQEEPGTPPSSPLSAEQLDRIQRNKAAALLRLAARNVPVGFGESWKKHLSGEFGKPYFIKLMGFVAEERKHYTVYPPPHQVFTWTQMCDIKDVKVVILGQDPYHGPNQAHGLCFSVQRPVPPPPSLENIYKELSTDIEDFVHPGHGDLSGWAKQGVLLLNAVLTVRAHQANSHKERGWEQFTDAVVSWLNQNSNGLVFLLWGSYAQKKGSAIDRKRHHVLQTAHPSPLSVYRGFFGCRHFSKTNELLQKSGKKPIDWKELSGGSPKKKRKVGGGGSGATNFSLLKQAGDVEENPGPMVSKGEELFTGVVPILVELDGDVNGHKFSVSGEGEGDATYGKLTLKFICTTGKLPVPWPTLVTTLTYGVQCFSRYPDHMKQHDFFKSAMPEGYVQERTIFFKDDGNYKTRAEVKFEGDTLVNRIELKGIDFKEDGNILGHKLEYNYNSHNVYIMADKQKNGIKVNFKIRHNIEDGSVQLADHYQQNTPIGDGPVLLPDNHYLSTQSALSKDPNEKRDHMVLLEFVTAAGITLGMDELYK

SEQ ID NO: 174 - protein, 1959 aa, Artificial Sequence
  Description of Artificial Sequence: Synthetic polypeptide
MDKKYSIGLAIGTNSVGWAVITDEYKVPSKKFKVLGNTDRHSIKKNLIGALLFDSGETAEATRLKRTARRRYTRRKNRICYLQEIFSNEMAKVDDSFFHRLEESFLVEEDKKHERHPIFGNIVDEVAYHEKYPTIYHLRKKLVDSTDKADLRLIYLALAHMIKFRGHFLIEGDLNPDNSDVDKLFIQLVQTYNQLFEENPINASGVDAKAILSARLSKSRRLENLIAQLPGEKKNGLFGNLIALSLGLTPNFKSNFDLAEDAKLQLSKDTYDDDLDNLLAQIGDQYADLFLAAKNLSDAILLSDILRVNTEITKAPLSASMIKRYDEHHQDLTLLKALVRQQLPEKYKEIFFDQSKNGYAGYIDGGASQEEFYKFIKPILEKMDGTEELLVKLNREDLLRKQRTFDNGSIPHQIHLGELHAILRRQEDFYPFLKDNREKIEKILTFRIPYYVGPLARGNSRFAWMTRKSEETITPWNFEEVVDKGASAQSFIERMTNFDKNLPNEKVLPKHSLLYEYFTVYNELTKVKYVTEGMRKPAFLSGEQKKAIVDLLFKTNRKVTVKQLKEDYFKKIECFDSVEISGVEDRFNASLGTYHDLLKIIKDKDFLDNEENEDILEDIVLTLTLFEDREMIEERLKTYAHLFDDKVMKQLKRRRYTGWGRLSRKLINGIRDKQSGKTILDFLKSDGFANRNFMQLIHDDSLTFKEDIQKAQVSGQGDSLHEHIANLAGSPAIKKGILQTVKVVDELVKVMGRHKPENIVIEMARENQTTQKGQKNSRERMKRIEEGIKELGSQILKEHPVENTQLQNEKLYLYYLQNGRDMYVDQELDINRLSDYDVDHIVPQSFLKDDSIDNKVLTRSDKNRGKSDNVPSEEVVKKMKNYWRQLLNAKLITQRKFDNLTKAERGGLSELDKAGFIKRQLVETRQITKHVAQILDSRMNTKYDENDKLIREVKVITLKSKLVSDFRKDFQFYKVREINNYHHAHDAYLNAVVGTALIKKYPKLESEFVYGDYKVYDVRKMIAKSEQEIGKATAKYFFYSNIMNFFKTEITLANGEIRKRPLIETNGETGEIVWDKGRDFATVRKVLSMPQVNIVKKTEVQTGGFSKESILPKRNSDKLIARKKDWDPKKYGGFDSPTVAYSVLVVAKVEKGKSKKLKSVKELLGITIMERSSFEKNPIDFLEAKGYKEVKKDLIIKLPKYSLFELENGRKRMLASAGELQKGNELALPSKYVNFLYLASHYEKLKGSPEDNEQKQLFVEQHKHYLDEIIEQISEFSKRVILADANLDKVLSAYNKHRDKPIREQAENIIHLFTLTNLGAPAAFKYFDTTIDRKRYTSTKEVLDATLIHQSITGLYETRIDLSQLGGDSGGSIGQKTLYSFFSPSPARKRHAPSPEPAVQGTGVAGVPEESGDAAAIPAKKAPAGQEEPGTPPSSPLSAEQLDRIQRNKAAALLRLAARNVPVGFGESWKKHLSGEFGKPYFIKLMGFVAEERKHYTVYPPPHQVFTWTQMCDIKDVKVVILGQDPYHGPNQAHGLCFSVQRPVPPPPSLENIYKELSTDIEDFVHPGHGDLSGWAKQGVLLLNAVLTVRAHQANSHKERGWEQFTDAVVSWLNQNSNGLVFLLWGSYAQKKGSAIDRKRHHVLQTAHPSPLSVYRGFFGCRHFSKTNELLQKSGKKPIDWKELSGGSPKKKRKVGGGGSGATNFSLLKQAGDVEENPGPMVSKGEELFTGVVPILVELDGDVNGHKFSVSGEGEGDATYGKLTLKFICTTGKLPVPWPTLVTTLTYGVQCFSRYPDHMKQHDFFKSAMPEGYVQERTIFFKDDGNYKTRAEVKFEGDTLVNRIELKGIDFKEDGNILGHKLEYNYNSHNVYIMADKQKNGIKVNFKIRHNIEDGSVQLADHYQQNTPIGDGPVLLPDNHYLSTQSALSKDPNEKRDHMVLLEFVTAAGITLGMDELYK

SEQ ID NO: 175 - protein, 2283 aa, Artificial Sequence
  Description of Artificial Sequence: Synthetic polypeptide
MAPKKKRKVGIHGVPAAMDKKYSIGLAIGTNSVGWAVITDEYKVPSKKFKVLGNTDRHSIKKNLIGALLFDSGETAEATRLKRTARRRYTRRKNRICYLQEIFSNEMAKVDDSFFHRLEESFLVEEDKKHERHPIFGNIVDEVAYHEKYPTIYHLRKKLVDSTDKADLRLIYLALAHMIKFRGHFLIEGDLNPDNSDVDKLFIQLVQTYNQLFEENPINASGVDAKAILSARLSKSRRLENLIAQLPGEKKNGLFGNLIALSLGLTPNFKSNFDLAEDAKLQLSKDTYDDDLDNLLAQIGDQYADLFLAAKNLSDAILLSDILRVNTEITKAPLSASMIKRYDEHHQDLTLLKALVRQQLPEKYKEIFFDQSKNGYAGYIDGGASQEEFYKFIKPILEKMDGTEELLVKLNREDLLRKQRTFDNGSIPHQIHLGELHAILRRQEDFYPFLKDNREKIEKILTFRIPYYVGPLARGNSRFAWMTRKSEETITPWNFEEVVDKGASAQSFIERMTNFDKNLPNEKVLPKHSLLYEYFTVYNELTKVKYVTEGMRKPAFLSGEQKKAIVDLLFKTNRKVTVKQLKEDYFKKIECFDSVEISGVEDRFNASLGTYHDLLKIIKDKDFLDNEENEDILEDIVLTLTLFEDREMIEERLKTYAHLFDDKVMKQLKRRRYTGWGRLSRKLINGIRDKQSGKTILDFLKSDGFANRNFMQLIHDDSLTFKEDIQKAQVSGQGDSLHEHIANLAGSPAIKKGILQTVKVVDELVKVMGRHKPENIVIEMARENQTTQKGQKNSRERMKRIEEGIKELGSQILKEHPVENTQLQNEKLYLYYLQNGRDMYVDQELDINRLSDYDVDHIVPQSFLKDDSIDNKVLTRSDKNRGKSDNVPSEEVVKKMKNYWRQLLNAKLITQRKFDNLTKAERGGLSELDKAGFIKRQLVETRQITKHVAQILDSRMNTKYDENDKLIREVKVITLKSKLVSDFRKDFQFYKVREINNYHHAHDAYLNAVVGTALIKKYPKLESEFVYGDYKVYDVRKMIAKSEQEIGKATAKYFFYSNIMNFFKTEITLANGEIRKRPLIETNGETGEIVWDKGRDFATVRKVLSMPQVNIVKKTEVQTGGFSKESILPKRNSDKLIARKKDWDPKKYGGFDSPTVAYSVLVVAKVEKGKSKKLKSVKELLGITIMERSSFEKNPIDFLEAKGYKEVKKDLIIKLPKYSLFELENGRKRMLASAGELQKGNELALPSKYVNFLYLASHYEKLKGSPEDNEQKQLFVEQHKHYLDEIIEQISEFSKRVILADANLDKVLSAYNKHRDKPIREQAENIIHLFTLTNLGAPAAFKYFDTTIDRKRYTSTKEVLDATLIHQSITGLYETRIDLSQLGGDSRADPKKKRKVGGGGTGGGGSAEYVRALFDFNGNDEEDLPFKKGDILRIRDKPEEQWWNAEDSEGKRGMILVPYVEKYSGDYKDHDGDYKDHDIDYKDDDDKSGMTDAEYVRIHEKLDIYTFKKQFFNNKKSVSHRCYVLFELKRRGERRACFWGYAVNKPQSGTERGIHAEIFSIRKVEEYLRDNPGQFTINWYSSWSPCADCAEKILEWYNQELRGNGHTLKIWACKLYYEKNARNQIGLWNLRDNGVGLNVMVSEHYQCCRKIFIQSSHNQLNENRWLEKTLKRAEKWRSELSIMIQVKILHTTKSPAVGPKKKRKVGTIGQKTLYSFFSPSPARKRHAPSPEPAVQGTGVAGVPEESGDAAAIPAKKAPAGQEEPGTPPSSPLSAEQLDRIQRNKAAALLRLAARNVPVGFGESWKKHLSGEFGKPYFIKLMGFVAEERKHYTVYPPPHQVFTWTQMCDIKDVKVVILGQDPYHGPNQAHGLCFSVQRPVPPPPSLENIYKELSTDIEDFVHPGHGDLSGWAKQGVLLLNAVLTVRAHQANSHKERGWEQFTDAVVSWLNQNSNGLVFLLWGSYAQKKGSAIDRKRHHVLQTAHPSPLSVYRGFFGCRHFSKTNELLQKSGKKPIDWKELGGGGSGATNFSLLKQAGDVEENPGPMVSKGEELFTGVVPILVELDGDVNGHKFSVSGEGEGDATYGKLTLKFICTTGKLPVPWPTLVTTLTYGVQCFSRYPDHMKQHDFFKSAMPEGYVQERTIFFKDDGNYKTRAEVKFEGDTLVNRIELKGIDFKEDGNILGHKLEYNYNSHNVYIMADKQKNGIKVNFKIRHNIEDGSVQLADHYQQNTPIGDGPVLLPDNHYLSTQSALSKDPNEKRDHMVLLEFVTAAGITLGMDELYK

SEQ ID NO: 176 - protein, 2075 aa, Artificial Sequence
  Description of Artificial Sequence: Synthetic polypeptide
MAPKKKRKVGIHGVPAAMDKKYSIGLAIGTNSVGWAVITDEYKVPSKKFKVLGNTDRHSIKKNLIGALLFDSGETAEATRLKRTARRRYTRRKNRICYLQEIFSNEMAKVDDSFFHRLEESFLVEEDKKHERHPIFGNIVDEVAYHEKYPTIYHLRKKLVDSTDKADLRLIYLALAHMIKFRGHFLIEGDLNPDNSDVDKLFIQLVQTYNQLFEENPINASGVDAKAILSARLSKSRRLENLIAQLPGEKKNGLFGNLIALSLGLTPNFKSNFDLAEDAKLQLSKDTYDDDLDNLLAQIGDQYADLFLAAKNLSDAILLSDILRVNTEITKAPLSASMIKRYDEHHQDLTLLKALVRQQLPEKYKEIFFDQSKNGYAGYIDGGASQEEFYKFIKPILEKMDGTEELLVKLNREDLLRKQRTFDNGSIPHQIHLGELHAILRRQEDFYPFLKDNREKIEKILTFRIPYYVGPLARGNSRFAWMTRKSEETITPWNFEEVVDKGASAQSFIERMTNFDKNLPNEKVLPKHSLLYEYFTVYNELTKVKYVTEGMRKPAFLSGEQKKAIVDLLFKTNRKVTVKQLKEDYFKKIECFDSVEISGVEDRFNASLGTYHDLLKIIKDKDFLDNEENEDILEDIVLTLTLFEDREMIEERLKTYAHLFDDKVMKQLKRRRYTGWGRLSRKLINGIRDKQSGKTILDFLKSDGFANRNFMQLIHDDSLTFKEDIQKAQVSGQGDSLHEHIANLAGSPAIKKGILQTVKVVDELVKVMGRHKPENIVIEMARENQTTQKGQKNSRERMKRIEEGIKELGSQILKEHPVENTQLQNEKLYLYYLQNGRDMYVDQELDINRLSDYDVDHIVPQSFLKDDSIDNKVLTRSDKNRGKSDNVPSEEVVKKMKNYWRQLLNAKLITQRKFDNLTKAERGGLSELDKAGFIKRQLVETRQITKHVAQILDSRMNTKYDENDKLIREVKVITLKSKLVSDFRKDFQFYKVREINNYHHAHDAYLNAVVGTALIKKYPKLESEFVYGDYKVYDVRKMIAKSEQEIGKATAKYFFYSNIMNFFKTEITLANGEIRKRPLIETNGETGEIVWDKGRDFATVRKVLSMPQVNIVKKTEVQTGGFSKESILPKRNSDKLIARKKDWDPKKYGGFDSPTVAYSVLVVAKVEKGKSKKLKSVKELLGITIMERSSFEKNPIDFLEAKGYKEVKKDLIIKLPKYSLFELENGRKRMLASAGELQKGNELALPSKYVNFLYLASHYEKLKGSPEDNEQKQLFVEQHKHYLDEIIEQISEFSKRVILADANLDKVLSAYNKHRDKPIREQAENIIHLFTLTNLGAPAAFKYFDTTIDRKRYTSTKEVLDATLIHQSITGLYETRIDLSQLGGDSRADPKKKRKVGGGGTGGGGSAEYVRALFDFNGNDEEDLPFKKGDILRIRDKPEEQWWNAEDSEGKRGMILVPYVEKYSGDYKDHDGDYKDHDIDYKDDDDKSGGPKKKRKVGTIGQKTLYSFFSPSPARKRHAPSPEPAVQGTGVAGVPEESGDAAAIPAKKAPAGQEEPGTPPSSPLSAEQLDRIQRNKAAALLRLAARNVPVGFGESWKKHLSGEFGKPYFIKLMGFVAEERKHYTVYPPPHQVFTWTQMCDIKDVKVVILGQDPYHGPNQAHGLCFSVQRPVPPPPSLENIYKELSTDIEDFVHPGHGDLSGWAKQGVLLLNAVLTVRAHQANSHKERGWEQFTDAVVSWLNQNSNGLVFLLWGSYAQKKGSAIDRKRHHVLQTAHPSPLSVYRGFFGCRHFSKTNELLQKSGKKPIDWKELGGGGSGATNFSLLKQAGDVEENPGPMVSKGEELFTGVVPILVELDGDVNGHKFSVSGEGEGDATYGKLTLKFICTTGKLPVPWPTLVTTLTYGVQCFSRYPDHMKQHDFFKSAMPEGYVQERTIFFKDDGNYKTRAEVKFEGDTLVNRIELKGIDFKEDGNILGHKLEYNYNSHNVYIMADKQKNGIKVNFKIRHNIEDGSVQLADHYQQNTPIGDGPVLLPDNHYLSTQSALSKDPNEKRDHMVLLEFVTAAGITLGMDELYK

SEQ ID NO: 177 - protein, 1857 aa, Artificial Sequence
  Description of Artificial Sequence: Synthetic polypeptide
MEASPASGPRHLMDPHIFTSNFNNGIGRHKTYLCYEVERLDNGTSVKMDQHRGFLHNQAKNLLCGFYGRHAELRFLDLVPSLQLDPAQIYRVTWFISWSPCFSWGCAGEVRAFLQENTHVRLRIFAARIYDYDPLYKEALQMLRDAGAQVSIMTYDEFKHCWDTFVDHQGCPFQPWDGLDEHSQALSGRLRAILQNQGNSGSETPGTSESATPESDKKYSIGLAIGTNSVGWAVITDEYKVPSKKFKVLGNTDRHSIKKNLIGALLFDSGETAEATRLKRTARRRYTRRKNRICYLQEIFSNEMAKVDDSFFHRLEESFLVEEDKKHERHPIFGNIVDEVAYHEKYPTIYHLRKKLVDSTDKADLRLIYLALAHMIKFRGHFLIEGDLNPDNSDVDKLFIQLVQTYNQLFEENPINASGVDAKAILSARLSKSRRLENLIAQLPGEKKNGLFGNLIALSLGLTPNFKSNFDLAEDAKLQLSKDTYDDDLDNLLAQIGDQYADLFLAAKNLSDAILLSDILRVNTEITKAPLSASMIKRYDEHHQDLTLLKALVRQQLPEKYKEIFFDQSKNGYAGYIDGGASQEEFYKFIKPILEKMDGTEELLVKLNREDLLRKQRTFDNGSIPHQIHLGELHAILRRQEDFYPFLKDNREKIEKILTFRIPYYVGPLARGNSRFAWMTRKSEETITPWNFEEVVDKGASAQSFIERMTNFDKNLPNEKVLPKHSLLYEYFTVYNELTKVKYVTEGMRKPAFLSGEQKKAIVDLLFKTNRKVTVKQLKEDYFKKIECFDSVEISGVEDRFNASLGTYHDLLKIIKDKDFLDNEENEDILEDIVLTLTLFEDREMIEERLKTYAHLFDDKVMKQLKRRRYTGWGRLSRKLINGIRDKQSGKTILDFLKSDGFANRNFMQLIHDDSLTFKEDIQKAQVSGQGDSLHEHIANLAGSPAIKKGILQTVKVVDELVKVMGRHKPENIVIEMARENQTTQKGQKNSRERMKRIEEGIKELGSQILKEHPVENTQLQNEKLYLYYLQNGRDMYVDQELDINRLSDYDVDHIVPQSFLKDDSIDNKVLTRSDKNRGKSDNVPSEEVVKKMKNYWRQLLNAKLITQRKFDNLTKAERGGLSELDKAGFIKRQLVETRQITKHVAQILDSRMNTKYDENDKLIREVKVITLKSKLVSDFRKDFQFYKVREINNYHHAHDAYLNAVVGTALIKKYPKLESEFVYGDYKVYDVRKMIAKSEQEIGKATAKYFFYSNIMNFFKTEITLANGEIRKRPLIETNGETGEIVWDKGRDFATVRKVLSMPQVNIVKKTEVQTGGFSKESILPKRNSDKLIARKKDWDPKKYGGFDSPTVAYSVLVVAKVEKGKSKKLKSVKELLGITIMERSSFEKNPIDFLEAKGYKEVKKDLIIKLPKYSLFELENGRKRMLASAGELQKGNELALPSKYVNFLYLASHYEKLKGSPEDNEQKQLFVEQHKHYLDEIIEQISEFSKRVILADANLDKVLSAYNKHRDKPIREQAENIIHLFTLTNLGAPAAFKYFDTTIDRKRYTSTKEVLDATLIHQSITGLYETRIDLSQLGGDSGGSPKKKRKVGGGGSGATNFSLLKQAGDVEENPGPMVSKGEELFTGVVPILVELDGDVNGHKFSVSGEGEGDATYGKLTLKFICTTGKLPVPWPTLVTTLTYGVQCFSRYPDHMKQHDFFKSAMPEGYVQERTIFFKDDGNYKTRAEVKFEGDTLVNRIELKGIDFKEDGNILGHKLEYNYNSHNVYIMADKQKNGIKVNFKIRHNIEDGSVQLADHYQQNTPIGDGPVLLPDNHYLSTQSALSKDPNEKRDHMVLLEFVTAAGITLGMDELYK

SEQ ID NO: 178 - protein, 1857 aa, Artificial Sequence
  Description of Artificial Sequence: Synthetic polypeptide
MEASPASGPRHLMDPHIFTSNFNNGIGRHKTYLCYEVERLDNGTSVKMDQHRGFLHGQAKNLLCGFYGRHAELRFLDLVPSLQLDPAQIYRVTWFISWSPCFSWGCAGEVRAFLQENTHVRLRIFAARIYDYDPLYKEALQMLRDAGAQVSIMTYDEFKHCWDTFVDHQGCPFQPWDGLDEHSQALSGRLRAILQNQGNSGSETPGTSESATPESDKKYSIGLAIGTNSVGWAVITDEYKVPSKKFKVLGNTDRHSIKKNLIGALLFDSGETAEATRLKRTARRRYTRRKNRICYLQEIFSNEMAKVDDSFFHRLEESFLVEEDKKHERHPIFGNIVDEVAYHEKYPTIYHLRKKLVDSTDKADLRLIYLALAHMIKFRGHFLIEGDLNPDNSDVDKLFIQLVQTYNQLFEENPINASGVDAKAILSARLSKSRRLENLIAQLPGEKKNGLFGNLIALSLGLTPNFKSNFDLAEDAKLQLSKDTYDDDLDNLLAQIGDQYADLFLAAKNLSDAILLSDILRVNTEITKAPLSASMIKRYDEHHQDLTLLKALVRQQLPEKYKEIFFDQSKNGYAGYIDGGASQEEFYKFIKPILEKMDGTEELLVKLNREDLLRKQRTFDNGSIPHQIHLGELHAILRRQEDFYPFLKDNREKIEKILTFRIPYYVGPLARGNSRFAWMTRKSEETITPWNFEEVVDKGASAQSFIERMTNFDKNLPNEKVLPKHSLLYEYFTVYNELTKVKYVTEGMRKPAFLSGEQKKAIVDLLFKTNRKVTVKQLKEDYFKKIECFDSVEISGVEDRFNASLGTYHDLLKIIKDKDFLDNEENEDILEDIVLTLTLFEDREMIEERLKTYAHLFDDKVMKQLKRRRYTGWGRLSRKLINGIRDKQSGKTILDFLKSDGFANRNFMQLIHDDSLTFKEDIQKAQVSGQGDSLHEHIANLAGSPAIKKGILQTVKVVDELVKVMGRHKPENIVIEMARENQTTQKGQKNSRERMKRIEEGIKELGSQILKEHPVENTQLQNEKLYLYYLQNGRDMYVDQELDINRLSDYDVDHIVPQSFLKDDSIDNKVLTRSDKNRGKSDNVPSEEVVKKMKNYWRQLLNAKLITQRKFDNLTKAERGGLSELDKAGFIKRQLVETRQITKHVAQILDSRMNTKYDENDKLIREVKVITLKSKLVSDFRKDFQFYKVREINNYHHAHDAYLNAVVGTALIKKYPKLESEFVYGDYKVYDVRKMIAKSEQEIGKATAKYFFYSNIMNFFKTEITLANGEIRKRPLIETNGETGEIVWDKGRDFATVRKVLSMPQVNIVKKTEVQTGGFSKESILPKRNSDKLIARKKDWDPKKYGGFDSPTVAYSVLVVAKVEKGKSKKLKSVKELLGITIMERSSFEKNPIDFLEAKGYKEVKKDLIIKLPKYSLFELENGRKRMLASAGELQKGNELALPSKYVNFLYLASHYEKLKGSPEDNEQKQLFVEQHKHYLDEIIEQISEFSKRVILADANLDKVLSAYNKHRDKPIREQAENIIHLFTLTNLGAPAAFKYFDTTIDRKRYTSTKEVLDATLIHQSITGLYETRIDLSQLGGDSGGSPKKKRKVGGGGSGATNFSLLKQAGDVEENPGPMVSKGEELFTGVVPILVELDGDVNGHKFSVSGEGEGDATYGKLTLKFICTTGKLPVPWPTLVTTLTYGVQCFSRYPDHMKQHDFFKSAMPEGYVQERTIFFKDDGNYKTRAEVKFEGDTLVNRIELKGIDFKEDGNILGHKLEYNYNSHNVYIMADKQKNGIKVNFKIRHNIEDGSVQLADHYQQNTPIGDGPVLLPDNHYLSTQSALSKDPNEKRDHMVLLEFVTAAGITLGMDELYK

SEQ ID NO: 179 - protein, 1856 aa, Artificial Sequence
  Description of Artificial Sequence: Synthetic polypeptide
MDSLLMNRRKFLYQFKNVRWAKGRRETYLCYVVKRRDSATSFSLDFGYLRNKNGCHVELLFLRYISDWDLDPGRCYRVTWFTSWSPCYDCARHVADFLRGNPNLSLRIFTARLYFCEDRKAEPEGLRRLHRAGVQIAIMTFKDYFYCWNTFVENHERTFKAWEGLHENSVRLSRQLRRILLPLYEVDDLRDAFRTLGLSGSETPGTSESATPESDKKYSIGLAIGTNSVGWAVITDEYKVPSKKFKVLGNTDRHSIKKNLIGALLFDSGETAEATRLKRTARRRYTRRKNRICYLQEIFSNEMAKVDDSFFHRLEESFLVEEDKKHERHPIFGNIVDEVAYHEKYPTIYHLRKKLVDSTDKADLRLIYLALAHMIKFRGHFLIEGDLNPDNSDVDKLFIQLVQTYNQLFEENPINASGVDAKAILSARLSKSRRLENLIAQLPGEKKNGLFGNLIALSLGLTPNFKSNFDLAEDAKLQLSKDTYDDDLDNLLAQIGDQYADLFLAAKNLSDAILLSDILRVNTEITKAPLSASMIKRYDEHHQDLTLLKALVRQQLPEKYKEIFFDQSKNGYAGYIDGGASQEEFYKFIKPILEKMDGTEELLVKLNREDLLRKQRTFDNGSIPHQIHLGELHAILRRQEDFYPFLKDNREKIEKILTFRIPYYVGPLARGNSRFAWMTRKSEETITPWNFEEVVDKGASAQSFIERMTNFDKNLPNEKVLPKHSLLYEYFTVYNELTKVKYVTEGMRKPAFLSGEQKKAIVDLLFKTNRKVTVKQLKEDYFKKIECFDSVEISGVEDRFNASLGTYHDLLKIIKDKDFLDNEENEDILEDIVLTLTLFEDREMIEERLKTYAHLFDDKVMKQLKRRRYTGWGRLSRKLINGIRDKQSGKTILDFLKSDGFANRNFMQLIHDDSLTFKEDIQKAQVSGQGDSLHEHIANLAGSPAIKKGILQTVKVVDELVKVMGRHKPENIVIEMARENQTTQKGQKNSRERMKRIEEGIKELGSQILKEHPVENTQLQNEKLYLYYLQNGRDMYVDQELDINRLSDYDVDHIVPQSFLKDDSIDNKVLTRSDKNRGKSDNVPSEEVVKKMKNYWRQLLNAKLITQRKFDNLTKAERGGLSELDKAGFIKRQLVETRQITKHVAQILDSRMNTKYDENDKLIREVKVITLKSKLVSDFRKDFQFYKVREINNYHHAHDAYLNAVVGTALIKKYPKLESEFVYGDYKVYDVRKMIAKSEQEIGKATAKYFFYSNIMNFFKTEITLANGEIRKRPLIETNGETGEIVWDKGRDFATVRKVLSMPQVNIVKKTEVQTGGFSKESILPKRNSDKLIARKKDWDPKKYGGFDSPTVAYSVLVVAKVEKGKSKKLKSVKELLGITIMERSSFEKNPIDFLEAKGYKEVKKDLIIKLPKYSLFELENGRKRMLASAGELQKGNELALPSKYVNFLYLASHYEKLKGSPEDNEQKQLFVEQHKHYLDEIIEQISEFSKRVILADANLDKVLSAYNKHRDKPIREQAENIIHLFTLTNLGAPAAFKYFDTTIDRKRYTSTKEVLDATLIHQSITGLYETRIDLSQLGGDSGGSPKKKRKVGGGGSGATNFSLLKQAGDVEENPGPMVSKGEELFTGVVPILVELDGDVNGHKFSVSGEGEGDATYGKLTLKFICTTGKLPVPWPTLVTTLTYGVQCFSRYPDHMKQHDFFKSAMPEGYVQERTIFFKDDGNYKTRAEVKFEGDTLVNRIELKGIDFKEDGNILGHKLEYNYNSHNVYIMADKQKNGIKVNFKIRHNIEDGSVQLADHYQQNTPIGDGPVLLPDNHYLSTQSALSKDPNEKRDHMVLLEFVTAAGITLGMDELYK

SEQ ID NO: 180 - protein, 1643 aa, Artificial Sequence
  Description of Artificial Sequence: Synthetic polypeptide
MDKKYSIGLAIGTNSVGWAVITDEYKVPSKKFKVLGNTDRHSIKKNLIGALLFDSGETAEATRLKRTARRRYTRRKNRICYLQEIFSNEMAKVDDSFFHRLEESFLVEEDKKHERHPIFGNIVDEVAYHEKYPTIYHLRKKLVDSTDKADLRLIYLALAHMIKFRGHFLIEGDLNPDNSDVDKLFIQLVQTYNQLFEENPINASGVDAKAILSARLSKSRRLENLIAQLPGEKKNGLFGNLIALSLGLTPNFKSNFDLAEDAKLQLSKDTYDDDLDNLLAQIGDQYADLFLAAKNLSDAILLSDILRVNTEITKAPLSASMIKRYDEHHQDLTLLKALVRQQLPEKYKEIFFDQSKNGYAGYIDGGASQEEFYKFIKPILEKMDGTEELLVKLNREDLLRKQRTFDNGSIPHQIHLGELHAILRRQEDFYPFLKDNREKIEKILTFRIPYYVGPLARGNSRFAWMTRKSEETITPWNFEEVVDKGASAQSFIERMTNFDKNLPNEKVLPKHSLLYEYFTVYNELTKVKYVTEGMRKPAFLSGEQKKAIVDLLFKTNRKVTVKQLKEDYFKKIECFDSVEISGVEDRFNASLGTYHDLLKIIKDKDFLDNEENEDILEDIVLTLTLFEDREMIEERLKTYAHLFDDKVMKQLKRRRYTGWGRLSRKLINGIRDKQSGKTILDFLKSDGFANRNFMQLIHDDSLTFKEDIQKAQVSGQGDSLHEHIANLAGSPAIKKGILQTVKVVDELVKVMGRHKPENIVIEMARENQTTQKGQKNSRERMKRIEEGIKELGSQILKEHPVENTQLQNEKLYLYYLQNGRDMYVDQELDINRLSDYDVDHIVPQSFLKDDSIDNKVLTRSDKNRGKSDNVPSEEVVKKMKNYWRQLLNAKLITQRKFDNLTKAERGGLSELDKAGFIKRQLVETRQITKHVAQILDSRMNTKYDENDKLIREVKVITLKSKLVSDFRKDFQFYKVREINNYHHAHDAYLNAVVGTALIKKYPKLESEFVYGDYKVYDVRKMIAKSEQEIGKATAKYFFYSNIMNFFKTEITLANGEIRKRPLIETNGETGEIVWDKGRDFATVRKVLSMPQVNIVKKTEVQTGGFSKESILPKRNSDKLIARKKDWDPKKYGGFDSPTVAYSVLVVAKVEKGKSKKLKSVKELLGITIMERSSFEKNPIDFLEAKGYKEVKKDLIIKLPKYSLFELENGRKRMLASAGELQKGNELALPSKYVNFLYLASHYEKLKGSPEDNEQKQLFVEQHKHYLDEIIEQISEFSKRVILADANLDKVLSAYNKHRDKPIREQAENIIHLFTLTNLGAPAAFKYFDTTIDRKRYTSTKEVLDATLIHQSITGLYETRIDLSQLGGDSGGSPKKKRKVGGGGSGATNFSLLKQAGDVEENPGPMVSKGEELFTGVVPILVELDGDVNGHKFSVSGEGEGDATYGKLTLKFICTTGKLPVPWPTLVTTLTYGVQCFSRYPDHMKQHDFFKSAMPEGYVQERTIFFKDDGNYKTRAEVKFEGDTLVNRIELKGIDFKEDGNILGHKLEYNYNSHNVYIMADKQKNGIKVNFKIRHNIEDGSVQLADHYQQNTPIGDGPVLLPDNHYLSTQSALSKDPNEKRDHMVLLEFVTAAGITLGMDELYK

SEQ ID NO: 181 - protein, 1969 aa, Artificial Sequence
  Description of Artificial Sequence: Synthetic polypeptide
MAPKKKRKVGIHGVPAAMDKKYSIGLAIGTNSVGWAVITDEYKVPSKKFKVLGNTDRHSIKKNLIGALLFDSGETAEATRLKRTARRRYTRRKNRICYLQEIFSNEMAKVDDSFFHRLEESFLVEEDKKHERHPIFGNIVDEVAYHEKYPTIYHLRKKLVDSTDKADLRLIYLALAHMIKFRGHFLIEGDLNPDNSDVDKLFIQLVQTYNQLFEENPINASGVDAKAILSARLSKSRRLENLIAQLPGEKKNGLFGNLIALSLGLTPNFKSNFDLAEDAKLQLSKDTYDDDLDNLLAQIGDQYADLFLAAKNLSDAILLSDILRVNTEITKAPLSASMIKRYDEHHQDLTLLKALVRQQLPEKYKEIFFDQSKNGYAGYIDGGASQEEFYKFIKPILEKMDGTEELLVKLNREDLLRKQRTFDNGSIPHQIHLGELHAILRRQEDFYPFLKDNREKIEKILTFRIPYYVGPLARGNSRFAWMTRKSEETITPWNFEEVVDKGASAQSFIERMTNFDKNLPNEKVLPKHSLLYEYFTVYNELTKVKYVTEGMRKPAFLSGEQKKAIVDLLFKTNRKVTVKQLKEDYFKKIECFDSVEISGVEDRFNASLGTYHDLLKIIKDKDFLDNEENEDILEDIVLTLTLFEDREMIEERLKTYAHLFDDKVMKQLKRRRYTGWGRLSRKLINGIRDKQSGKTILDFLKSDGFANRNFMQLIHDDSLTFKEDIQKAQVSGQGDSLHEHIANLAGSPAIKKGILQTVKVVDELVKVMGRHKPENIVIEMARENQTTQKGQKNSRERMKRIEEGIKELGSQILKEHPVENTQLQNEKLYLYYLQNGRDMYVDQELDINRLSDYDVDHIVPQSFLKDDSIDNKVLTRSDKNRGKSDNVPSEEVVKKMKNYWRQLLNAKLITQRKFDNLTKAERGGLSELDKAGFIKRQLVETRQITKHVAQILDSRMNTKYDENDKLIREVKVITLKSKLVSDFRKDFQFYKVREINNYHHAHDAYLNAVVGTALIKKYPKLESEFVYGDYKVYDVRKMIAKSEQEIGKATAKYFFYSNIMNFFKTEITLANGEIRKRPLIETNGETGEIVWDKGRDFATVRKVLSMPQVNIVKKTEVQTGGFSKESILPKRNSDKLIARKKDWDPKKYGGFDSPTVAYSVLVVAKVEKGKSKKLKSVKELLGITIMERSSFEKNPIDFLEAKGYKEVKKDLIIKLPKYSLFELENGRKRMLASAGELQKGNELALPSKYVNFLYLASHYEKLKGSPEDNEQKQLFVEQHKHYLDEIIEQISEFSKRVILADANLDKVLSAYNKHRDKPIREQAENIIHLFTLTNLGAPAAFKYFDTTIDRKRYTSTKEVLDATLIHQSITGLYETRIDLSQLGGDSRADPKKKRKVGGGGTGGGGSAEYVRALFDFNGNDEEDLPFKKGDILRIRDKPEEQWWNAEDSEGKRGMILVPYVEKYSGDYKDHDGDYKDHDIDYKDDDDKSGMTDAEYVRIHEKLDIYTFKKQFFNNKKSVSHRCYVLFELKRRGERRACFWGYAVNKPQSGTERGIHAEIFSIRKVEEYLRDNPGQFTINWYSSWSPCADCAEKILEWYNQELRGNGHTLKIWACKLYYEKNARNQIGLWNLRDNGVGLNVMVSEHYQCCRKIFIQSSHNQLNENRWLEKTLKRAEKWRSELSIMIQVKILHTTKSPAVGPKKKRKVGGGGSGATNFSLLKQAGDVEENPGPMVSKGEELFTGVVPILVELDGDVNGHKFSVSGEGEGDATYGKLTLKFICTTGKLPVPWPTLVTTLTYGVQCFSRYPDHMKQHDFFKSAMPEGYVQERTIFFKDDGNYKTRAEVKFEGDTLVNRIELKGIDFKEDGNILGHKLEYNYNSHNVYIMADKQKNGIKVNFKIRHNIEDGSVQLADHYQQNTPIGDGPVLLPDNHYLSTQSALSKDPNEKRDHMVLLEFVTAAGITLGMDELYK

SEQ ID NO: 182 - protein, 1758 aa, Artificial Sequence
  Description of Artificial Sequence: Synthetic polypeptide
MAPKKKRKVGIHGVPAAMDKKYSIGLAIGTNSVGWAVITDEYKVPSKKFKVLGNTDRHSIKKNLIGALLFDSGETAEATRLKRTARRRYTRRKNRICYLQEIFSNEMAKVDDSFFHRLEESFLVEEDKKHERHPIFGNIVDEVAYHEKYPTIYHLRKKLVDSTDKADLRLIYLALAHMIKFRGHFLIEGDLNPDNSDVDKLFIQLVQTYNQLFEENPINASGVDAKAILSARLSKSRRLENLIAQLPGEKKNGLFGNLIALSLGLTPNFKSNFDLAEDAKLQLSKDTYDDDLDNLLAQIGDQYADLFLAAKNLSDAILLSDILRVNTEITKAPLSASMIKRYDEHHQDLTLLKALVRQQLPEKYKEIFFDQSKNGYAGYIDGGASQEEFYKFIKPILEKMDGTEELLVKLNREDLLRKQRTFDNGSIPHQIHLGELHAILRRQEDFYPFLKDNREKIEKILTFRIPYYVGPLARGNSRFAWMTRKSEETITPWNFEEVVDKGASAQSFIERMTNFDKNLPNEKVLPKHSLLYEYFTVYNELTKVKYVTEGMRKPAFLSGEQKKAIVDLLFKTNRKVTVKQLKEDYFKKIECFDSVEISGVEDRFNASLGTYHDLLKIIKDKDFLDNEENEDILEDIVLTLTLFEDREMIEERLKTYAHLFDDKVMKQLKRRRYTGWGRLSRKLINGIRDKQSGKTILDFLKSDGFANRNFMQLIHDDSLTFKEDIQKAQVSGQGDSLHEHIANLAGSPAIKKGILQTVKVVDELVKVMGRHKPENIVIEMARENQTTQKGQKNSRERMKRIEEGIKELGSQILKEHPVENTQLQNEKLYLYYLQNGRDMYVDQELDINRLSDYDVDHIVPQSFLKDDSIDNKVLTRSDKNRGKSDNVPSEEVVKKMKNYWRQLLNAKLITQRKFDNLTKAERGGLSELDKAGFIKRQLVETRQITKHVAQILDSRMNTKYDENDKLIREVKVITLKSKLVSDFRKDFQFYKVREINNYHHAHDAYLNAVVGTALIKKYPKLESEFVYGDYKVYDVRKMIAKSEQEIGKATAKYFFYSNIMNFFKTEITLANGEIRKRPLIETNGETGEIVWDKGRDFATVRKVLSMPQVNIVKKTEVQTGGFSKESILPKRNSDKLIARKKDWDPKKYGGFDSPTVAYSVLVVAKVEKGKSKKLKSVKELLGITIMERSSFEKNPIDFLEAKGYKEVKKDLIIKLPKYSLFELENGRKRMLASAGELQKGNELALPSKYVNFLYLASHYEKLKGSPEDNEQKQLFVEQHKHYLDEIIEQISEFSKRVILADANLDKVLSAYNKHRDKPIREQAENIIHLFTLTNLGAPAAFKYFDTTIDRKRYTSTKEVLDATLIHQSITGLYETRIDLSQLGGDSRADPKKKRKVGGGGTGGGGSAEYVRALFDFNGNDEEDLPFKKGDILRIRDKPEEQWWNAEDSEGKRGMILVPYVEKYSGDYKDHDGDYKDHDIDYKDDDDKSGGPKKKRKVGGGGSGATNFSLLKQAGDVEENPGPMVSKGEELFTGVVPILVELDGDVNGHKFSVSGEGEGDATYGKLTLKFICTTGKLPVPWPTLVTTLTYGVQCFSRYPDHMKQHDFFKSAMPEGYVQERTIFFKDDGNYKTRAEVKFEGDTLVNRIELKGIDFKEDGNILGHKLEYNYNSHNVYIMADKQKNGIKVNFKIRHNIEDGSVQLADHYQQNTPIGDGPVLLPDNHYLSTQSALSKDPNEKRDHMVLLEFVTAAGITLGMDE

SEQ ID NO: 183 - protein, 2354 aa, Artificial Sequence
  Description of Artificial Sequence: Synthetic polypeptide
MKRTADGSEFESPKKKRKVSEVEFSHEYWMRHALTLAKRARDEREVPVGAVLVLNNRVIGEGWNRAIGLHDPTAHAEIMALRQGGLVMQNYRLIDATLYGTFEPCVMCAGAMIHSRIGRVVFGVRNAKTGAAGSLMDVLHYPGMNHRVEITEGILADECAALLCYFFRMPRQVFNAQKKAQSSTDSGGSSGGSSGSETPGTSESATPESSGGSSGGSDKKYSIGLAIGTNSVGWAVITDEYKVPSKKFKVLGNTDRHSIKKNLIGALLFDSGETAEATRLKRTARRRYTRRKNRICYLQEIFSNEMAKVDDSFFHRLEESFLVEEDKKHERHPIFGNIVDEVAYHEKYPTIYHLRKKLVDSTDKADLRLIYLALAHMIKFRGHFLIEGDLNPDNSDVDKLFIQLVQTYNQLFEENPINASGVDAKAILSARLSKSRRLENLIAQLPGEKKNGLFGNLIALSLGLTPNFKSNFDLAEDAKLQLSKDTYDDDLDNLLAQIGDQYADLFLAAKNLSDAILLSDILRVNTEITKAPLSASMIKRYDEHHQDLTLLKALVRQQLPEKYKEIFFDQSKNGYAGYIDGGASQEEFYKFIKPILEKMDGTEELLVKLNREDLLRKQRTFDNGSIPHQIHLGELHAILRRQEDFYPFLKDNREKIEKILTFRIPYYVGPLARGNSRFAWMTRKSEETITPWNFEEVVDKGASAQSFIERMTNFDKNLPNEKVLPKHSLLYEYFTVYNELTKVKYVTEGMRKPAFLSGEQKKAIVDLLFKTNRKVTVKQLKEDYFKKIECFDSVEISGVEDRFNASLGTYHDLLKIIKDKDFLDNEENEDILEDIVLTLTLFEDREMIEERLKTYAHLFDDKVMKQLKRRRYTGWGRLSRKLINGIRDKQSGKTILDFLKSDGFANRNFMQLIHDDSLTFKEDIQKAQVSGQGDSLHEHIANLAGSPAIKKGILQTVKVVDELVKVMGRHKPENIVIEMARENQTTQKGQKNSRERMKRIEEGIKELGSQILKEHPVENTQLQNEKLYLYYLQNGRDMYVDQELDINRLSDYDVDHIVPQSFLKDDSIDNKVLTRSDKNRGKSDNVPSEEVVKKMKNYWRQLLNAKLITQRKFDNLTKAERGGLSELDKAGFIKRQLVETRQITKHVAQILDSRMNTKYDENDKLIREVKVITLKSKLVSDFRKDFQFYKVREINNYHHAHDAYLNAVVGTALIKKYPKLESEFVYGDYKVYDVRKMIAKSEQEIGKATAKYFFYSNIMNFFKTEITLANGEIRKRPLIETNGETGEIVWDKGRDFATVRKVLSMPQVNIVKKTEVQTGGFSKESILPKRNSDKLIARKKDWDPKKYGGFDSPTVAYSVLVVAKVEKGKSKKLKSVKELLGITIMERSSFEKNPIDFLEAKGYKEVKKDLIIKLPKYSLFELENGRKRMLASAGELQKGNELALPSKYVNFLYLASHYEKLKGSPEDNEQKQLFVEQHKHYLDEIIEQISEFSKRVILADANLDKVLSAYNKHRDKPIREQAENIIHLFTLTNLGAPAAFKYFDTTIDRKRYTSTKEVLDATLIHQSITGLYETRIDLSQLGGDSGGSKRTADGSEFEPKKKRKVSGGSSGGSSGSETPGTSESATPESSGGSSGGSTDAEYVRIHEKLDIYTFKKQFFNNKKSVSHRCYVLFELKRRGERRACFWGYAVNKPQSGTERGIHAEIFSIRKVEEYLRDNPGQFTINWYSSWSPCADCAEKILEWYNQELRGNGHTLKIWACKLYYEKNARNQIGLWNLRDNGVGLNVMVSEHYQCCRKIFIQSSHNQLNENRWLEKTLKRAEKWRSELSIMIQVKILHTTKSPAVSGGSGGSGGSANELTWHDVLAEEKQQPYFLNTLQTVASERQSGVTIYPPQKDVFNAFRFTELGDVKVVILGQDPYHGPGQAHGLAFSVRPGIAIPPSLLNMYKELENTIPGFTRPNHGYLESWARQGVLLLNTVLTVRAGQAHSHASLGWETFTDKVISLINQHREGVVFLLWGSHAQKKGAIIDKQRHHVLKAPHPSPLSAHRGFFGCNHFVLANQWLEQRGETPIDWMPVLPAESEGSGATNFSLLKQAGDVEENPGPMVSKGEELFTGVVPILVELDGDVNGHKFSVSGEGEGDATYGKLTLKFICTTGKLPVPWPTLVTTLTYGVQCFSRYPDHMKQHDFFKSAMPEGYVQERTIFFKDDGNYKTRAEVKFEGDTLVNRIELKGIDFKEDGNILGHKLEYNYNSHNVYIMADKQKNGIKVNFKIRHNIEDGSVQLADHYQQNTPIGDGPVLLPDNHYLSTQSALSKDPNEKRDHMVLLEFVTAAGITLGMDELYKSGGSPKKKRKV

SEQ ID NO: 184 - protein, 2438 aa, Artificial Sequence
  Description of Artificial Sequence: Synthetic polypeptide
MKRTADGSEFESPKKKRKVSEVEFSHEYWMRHALTLAKRARDEREVPVGAVLVLNNRVIGEGWNRAIGLHDPTAHAEIMALRQGGLVMQNYRLIDATLYGTFEPCVMCAGAMIHSRIGRVVFGVRNAKTGAAGSLMDVLHYPGMNHRVEITEGILADECAALLCYFFRMPRQVFNAQKKAQSSTDSGGSSGGSSGSETPGTSESATPESSGGSSGGSDKKYSIGLAIGTNSVGWAVITDEYKVPSKKFKVLGNTDRHSIKKNLIGALLFDSGETAEATRLKRTARRRYTRRKNRICYLQEIFSNEMAKVDDSFFHRLEESFLVEEDKKHERHPIFGNIVDEVAYHEKYPTIYHLRKKLVDSTDKADLRLIYLALAHMIKFRGHFLIEGDLNPDNSDVDKLFIQLVQTYNQLFEENPINASGVDAKAILSARLSKSRRLENLIAQLPGEKKNGLFGNLIALSLGLTPNFKSNFDLAEDAKLQLSKDTYDDDLDNLLAQIGDQYADLFLAAKNLSDAILLSDILRVNTEITKAPLSASMIKRYDEHHQDLTLLKALVRQQLPEKYKEIFFDQSKNGYAGYIDGGASQEEFYKFIKPILEKMDGTEELLVKLNREDLLRKQRTFDNGSIPHQIHLGELHAILRRQEDFYPFLKDNREKIEKILTFRIPYYVGPLARGNSRFAWMTRKSEETITPWNFEEVVDKGASAQSFIERMTNFDKNLPNEKVLPKHSLLYEYFTVYNELTKVKYVTEGMRKPAFLSGEQKKAIVDLLFKTNRKVTVKQLKEDYFKKIECFDSVEISGVEDRFNASLGTYHDLLKIIKDKDFLDNEENEDILEDIVLTLTLFEDREMIEERLKTYAHLFDDKVMKQLKRRRYTGWGRLSRKLINGIRDKQSGKTILDFLKSDGFANRNFMQLIHDDSLTFKEDIQKAQVSGQGDSLHEHIANLAGSPAIKKGILQTVKVVDELVKVMGRHKPENIVIEMARENQTTQKGQKNSRERMKRIEEGIKELGSQILKEHPVENTQLQNEKLYLYYLQNGRDMYVDQELDINRLSDYDVDHIVPQSFLKDDSIDNKVLTRSDKNRGKSDNVPSEEVVKKMKNYWRQLLNAKLITQRKFDNLTKAERGGLSELDKAGFIKRQLVETRQITKHVAQILDSRMNTKYDENDKLIREVKVITLKSKLVSDFRKDFQFYKVREINNYHHAHDAYLNAVVGTALIKKYPKLESEFVYGDYKVYDVRKMIAKSEQEIGKATAKYFFYSNIMNFFKTEITLANGEIRKRPLIETNGETGEIVWDKGRDFATVRKVLSMPQVNIVKKTEVQTGGFSKESILPKRNSDKLIARKKDWDPKKYGGFDSPTVAYSVLVVAKVEKGKSKKLKSVKELLGITIMERSSFEKNPIDFLEAKGYKEVKKDLIIKLPKYSLFELENGRKRMLASAGELQKGNELALPSKYVNFLYLASHYEKLKGSPEDNEQKQLFVEQHKHYLDEIIEQISEFSKRVILADANLDKVLSAYNKHRDKPIREQAENIIHLFTLTNLGAPAAFKYFDTTIDRKRYTSTKEVLDATLIHQSITGLYETRIDLSQLGGDSGGSKRTADGSEFEPKKKRKVSGGSSGGSSGSETPGTSESATPESSGGSSGGSTDAEYVRIHEKLDIYTFKKQFFNNKKSVSHRCYVLFELKRRGERRACFWGYAVNKPQSGTERGIHAEIFSIRKVEEYLRDNPGQFTINWYSSWSPCADCAEKILEWYNQELRGNGHTLKIWACKLYYEKNARNQIGLWNLRDNGVGLNVMVSEHYQCCRKIFIQSSHNQLNENRWLEKTLKRAEKWRSELSIMIQVKILHTTKSPAVSGGSGGSGGSIGQKTLYSFFSPSPARKRHAPSPEPAVQGTGVAGVPEESGDAAAIPAKKAPAGQEEPGTPPSSPLSAEQLDRIQRNKAAALLRLAARNVPVGFGESWKKHLSGEFGKPYFIKLMGFVAEERKHYTVYPPPHQVFTWTQMCDIKDVKVVILGQDPYHGPNQAHGLCFSVQRPVPPPPSLENIYKELSTDIEDFVHPGHGDLSGWAKQGVLLLNAVLTVRAHQANSHKERGWEQFTDAVVSWLNQNSNGLVFLLWGSYAQKKGSAIDRKRHHVLQTAHPSPLSVYRGFFGCRHFSKTNELLQKSGKKPIDWKELGSGATNFSLLKQAGDVEENPGPMVSKGEELFTGVVPILVELDGDVNGHKFSVSGEGEGDATYGKLTLKFICTTGKLPVPWPTLVTTLTYGVQCFSRYPDHMKQHDFFKSAMPEGYVQERTIFFKDDGNYKTRAEVKFEGDTLVNRIELKGIDFKEDGNILGHKLEYNYNSHNVYIMADKQKNGIKVNFKIRHNIEDGSVQLADHYQQNTPIGDGPVLLPDNHYLSTQSALSKDPNEKRDHMVLLEFVTAAGITLGMDELYKSGGSPKKKRKV

SEQ ID NO: 185 - protein, 2313 aa, Artificial Sequence
  Description of Artificial Sequence: Synthetic polypeptide
MKRTADGSEFESPKKKRKVSEVEFSHEYWMRHALTLAKRAWDEREVPVGAVLVHNNRVIGEGWNRPIGRHDPTAHAEIMALRQGGLVMQNYRLIDATLYVTLEPCVMCAGAMIHSRIGRVVFGARDAKTGAAGSLMDVLHHPGMNHRVEITEGILADECAALLSDFFRMRRQEIKAQKKAQSSTDSGGSSGGSSGSETPGTSESATPESSGGSSGGSSEVEFSHEYWMRHALTLAKRARDEREVPVGAVLVLNNRVIGEGWNRAIGLHDPTAHAEIMALRQGGLVMQNYRLIDATLYVTFEPCVMCAGAMIHSRIGRVVFGVRNAKTGAAGSLMDVLHYPGMNHRVEITEGILADECAALLCYFFRMPRQVFNAQKKAQSSTDSGGSSGGSSGSETPGTSESATPESSGGSSGGSDKKYSIGLAIGTNSVGWAVITDEYKVPSKKFKVLGNTDRHSIKKNLIGALLFDSGETAEATRLKRTARRRYTRRKNRICYLQEIFSNEMAKVDDSFFHRLEESFLVEEDKKHERHPIFGNIVDEVAYHEKYPTIYHLRKKLVDSTDKADLRLIYLALAHMIKFRGHFLIEGDLNPDNSDVDKLFIQLVQTYNQLFEENPINASGVDAKAILSARLSKSRRLENLIAQLPGEKKNGLFGNLIALSLGLTPNFKSNFDLAEDAKLQLSKDTYDDDLDNLLAQIGDQYADLFLAAKNLSDAILLSDILRVNTEITKAPLSASMIKRYDEHHQDLTLLKALVRQQLPEKYKEIFFDQSKNGYAGYIDGGASQEEFYKFIKPILEKMDGTEELLVKLNREDLLRKQRTFDNGSIPHQIHLGELHAILRRQEDFYPFLKDNREKIEKILTFRIPYYVGPLARGNSRFAWMTRKSEETITPWNFEEVVDKGASAQSFIERMTNFDKNLPNEKVLPKHSLLYEYFTVYNELTKVKYVTEGMRKPAFLSGEQKKAIVDLLFKTNRKVTVKQLKEDYFKKIECFDSVEISGVEDRFNASLGTYHDLLKIIKDKDFLDNEENEDILEDIVLTLTLFEDREMIEERLKTYAHLFDDKVMKQLKRRRYTGWGRLSRKLINGIRDKQSGKTILDFLKSDGFANRNFMQLIHDDSLTFKEDIQKAQVSGQGDSLHEHIANLAGSPAIKKGILQTVKVVDELVKVMGRHKPENIVIEMARENQTTQKGQKNSRERMKRIEEGIKELGSQILKEHPVENTQLQNEKLYLYYLQNGRDMYVDQELDINRLSDYDVDHIVPQSFLKDDSIDNKVLTRSDKNRGKSDNVPSEEVVKKMKNYWRQLLNAKLITQRKFDNLTKAERGGLSELDKAGFIKRQLVETRQITKHVAQILDSRMNTKYDENDKLIREVKVITLKSKLVSDFRKDFQFYKVREINNYHHAHDAYLNAVVGTALIKKYPKLESEFVYGDYKVYDVRKMIAKSEQEIGKATAKYFFYSNIMNFFKTEITLANGEIRKRPLIETNGETGEIVWDKGRDFATVRKVLSMPQVNIVKKTEVQTGGFSKESILPKRNSDKLIARKKDWDPKKYGGFDSPTVAYSVLVVAKVEKGKSKKLKSVKELLGITIMERSSFEKNPIDFLEAKGYKEVKKDLIIKLPKYSLFELENGRKRMLASAGELQKGNELALPSKYVNFLYLASHYEKLKGSPEDNEQKQLFVEQHKHYLDEIIEQISEFSKRVILADANLDKVLSAYNKHRDKPIREQAENIIHLFTLTNLGAPAAFKYFDTTIDRKRYTSTKEVLDATLIHQSITGLYETRIDLSQLGGDSGGSGGSGGSANELTWHDVLAEEKQQPYFLNTLQTVASERQSGVTIYPPQKDVFNAFRFTELGDVKVVILGQDPYHGPGQAHGLAFSVRPGIAIPPSLLNMYKELENTIPGFTRPNHGYLESWARQGVLLLNTVLTVRAGQAHSHASLGWETFTDKVISLINQHREGVVFLLWGSHAQKKGAIIDKQRHHVLKAPHPSPLSAHRGFFGCNHFVLANQWLEQRGETPIDWMPVLPAESESGGSKRTADGSEFEPKKKRKVGSGATNFSLLKQAGDVEENPGPMVSKGEELFTGVVPILVELDGDVNGHKFSVSGEGEGDATYGKLTLKFICTTGKLPVPWPTLVTTLTYGVQCFSRYPDHMKQHDFFKSAMPEGYVQERTIFFKDDGNYKTRAEVKFEGDTLVNRIELKGIDFKEDGNILGHKLEYNYNSHNVYIMADKQKNGIKVNFKIRHNIEDGSVQLADHYQQNTPIGDGPVLLPDNHYLSTQSALSKDPNEKRDHMVLLEFVTAAGITLGMDELYKSGGSPKKKRKV

SEQ ID NO: 186 - protein, 2115 aa, Artificial Sequence
  Description of Artificial Sequence: Synthetic polypeptide
MKRTADGSEFESPKKKRKVSEVEFSHEYWMRHALTLAKRARDEREVPVGAVLVLNNRVIGEGWNRAIGLHDPTAHAEIMALRQGGLVMQNYRLIDATLYGTFEPCVMCAGAMIHSRIGRVVFGVRNAKTGAAGSLMDVLHYPGMNHRVEITEGILADECAALLCYFFRMPRQVFNAQKKAQSSTDSGGSSGGSSGSETPGTSESATPESSGGSSGGSDKKYSIGLAIGTNSVGWAVITDEYKVPSKKFKVLGNTDRHSIKKNLIGALLFDSGETAEATRLKRTARRRYTRRKNRICYLQEIFSNEMAKVDDSFFHRLEESFLVEEDKKHERHPIFGNIVDEVAYHEKYPTIYHLRKKLVDSTDKADLRLIYLALAHMIKFRGHFLIEGDLNPDNSDVDKLFIQLVQTYNQLFEENPINASGVDAKAILSARLSKSRRLENLIAQLPGEKKNGLFGNLIALSLGLTPNFKSNFDLAEDAKLQLSKDTYDDDLDNLLAQIGDQYADLFLAAKNLSDAILLSDILRVNTEITKAPLSASMIKRYDEHHQDLTLLKALVRQQLPEKYKEIFFDQSKNGYAGYIDGGASQEEFYKFIKPILEKMDGTEELLVKLNREDLLRKQRTFDNGSIPHQIHLGELHAILRRQEDFYPFLKDNREKIEKILTFRIPYYVGPLARGNSRFAWMTRKSEETITPWNFEEVVDKGASAQSFIERMTNFDKNLPNEKVLPKHSLLYEYFTVYNELTKVKYVTEGMRKPAFLSGEQKKAIVDLLFKTNRKVTVKQLKEDYFKKIECFDSVEISGVEDRFNASLGTYHDLLKIIKDKDFLDNEENEDILEDIVLTLTLFEDREMIEERLKTYAHLFDDKVMKQLKRRRYTGWGRLSRKLINGIRDKQSGKTILDFLKSDGFANRNFMQLIHDDSLTFKEDIQKAQVSGQGDSLHEHIANLAGSPAIKKGILQTVKVVDELVKVMGRHKPENIVIEMARENQTTQKGQKNSRERMKRIEEGIKELGSQILKEHPVENTQLQNEKLYLYYLQNGRDMYVDQELDINRLSDYDVDHIVPQSFLKDDSIDNKVLTRSDKNRGKSDNVPSEEVVKKMKNYWRQLLNAKLITQRKFDNLTKAERGGLSELDKAGFIKRQLVETRQITKHVAQILDSRMNTKYDENDKLIREVKVITLKSKLVSDFRKDFQFYKVREINNYHHAHDAYLNAVVGTALIKKYPKLESEFVYGDYKVYDVRKMIAKSEQEIGKATAKYFFYSNIMNFFKTEITLANGEIRKRPLIETNGETGEIVWDKGRDFATVRKVLSMPQVNIVKKTEVQTGGFSKESILPKRNSDKLIARKKDWDPKKYGGFDSPTVAYSVLVVAKVEKGKSKKLKSVKELLGITIMERSSFEKNPIDFLEAKGYKEVKKDLIIKLPKYSLFELENGRKRMLASAGELQKGNELALPSKYVNFLYLASHYEKLKGSPEDNEQKQLFVEQHKHYLDEIIEQISEFSKRVILADANLDKVLSAYNKHRDKPIREQAENIIHLFTLTNLGAPAAFKYFDTTIDRKRYTSTKEVLDATLIHQSITGLYETRIDLSQLGGDSGGSGGSGGSANELTWHDVLAEEKQQPYFLNTLQTVASERQSGVTIYPPQKDVFNAFRFTELGDVKVVILGQDPYHGPGQAHGLAFSVRPGIAIPPSLLNMYKELENTIPGFTRPNHGYLESWARQGVLLLNTVLTVRAGQAHSHASLGWETFTDKVISLINQHREGVVFLLWGSHAQKKGAIIDKQRHHVLKAPHPSPLSAHRGFFGCNHFVLANQWLEQRGETPIDWMPVLPAESESGGSKRTADGSEFEPKKKRKVGSGATNFSLLKQAGDVEENPGPMVSKGEELFTGVVPILVELDGDVNGHKFSVSGEGEGDATYGKLTLKFICTTGKLPVPWPTLVTTLTYGVQCFSRYPDHMKQHDFFKSAMPEGYVQERTIFFKDDGNYKTRAEVKFEGDTLVNRIELKGIDFKEDGNILGHKLEYNYNSHNVYIMADKQKNGIKVNFKIRHNIEDGSVQLADHYQQNTPIGDGPVLLPDNHYLSTQSALSKDPNEKRDHMVLLEFVTAAGITLGMDELYKSGGSPKKKRKV

SEQ ID NO: 187 - protein, 1949 aa, Artificial Sequence
  Description of Artificial Sequence: Synthetic polypeptide
MKRTADGSEFESPKKKRKVSGGSSGGSSGSETPGTSESATPESSGGSSGGSDKKYSIGLAIGTNSVGWAVITDEYKVPSKKFKVLGNTDRHSIKKNLIGALLFDSGETAEATRLKRTARRRYTRRKNRICYLQEIFSNEMAKVDDSFFHRLEESFLVEEDKKHERHPIFGNIVDEVAYHEKYPTIYHLRKKLVDSTDKADLRLIYLALAHMIKFRGHFLIEGDLNPDNSDVDKLFIQLVQTYNQLFEENPINASGVDAKAILSARLSKSRRLENLIAQLPGEKKNGLFGNLIALSLGLTPNFKSNFDLAEDAKLQLSKDTYDDDLDNLLAQIGDQYADLFLAAKNLSDAILLSDILRVNTEITKAPLSASMIKRYDEHHQDLTLLKALVRQQLPEKYKEIFFDQSKNGYAGYIDGGASQEEFYKFIKPILEKMDGTEELLVKLNREDLLRKQRTFDNGSIPHQIHLGELHAILRRQEDFYPFLKDNREKIEKILTFRIPYYVGPLARGNSRFAWMTRKSEETITPWNFEEVVDKGASAQSFIERMTNFDKNLPNEKVLPKHSLLYEYFTVYNELTKVKYVTEGMRKPAFLSGEQKKAIVDLLFKTNRKVTVKQLKEDYFKKIECFDSVEISGVEDRFNASLGTYHDLLKIIKDKDFLDNEENEDILEDIVLTLTLFEDREMIEERLKTYAHLFDDKVMKQLKRRRYTGWGRLSRKLINGIRDKQSGKTILDFLKSDGFANRNFMQLIHDDSLTFKEDIQKAQVSGQGDSLHEHIANLAGSPAIKKGILQTVKVVDELVKVMGRHKPENIVIEMARENQTTQKGQKNSRERMKRIEEGIKELGSQILKEHPVENTQLQNEKLYLYYLQNGRDMYVDQELDINRLSDYDVDHIVPQSFLKDDSIDNKVLTRSDKNRGKSDNVPSEEVVKKMKNYWRQLLNAKLITQRKFDNLTKAERGGLSELDKAGFIKRQLVETRQITKHVAQILDSRMNTKYDENDKLIREVKVITLKSKLVSDFRKDFQFYKVREINNYHHAHDAYLNAVVGTALIKKYPKLESEFVYGDYKVYDVRKMIAKSEQEIGKATAKYFFYSNIMNFFKTEITLANGEIRKRPLIETNGETGEIVWDKGRDFATVRKVLSMPQVNIVKKTEVQTGGFSKESILPKRNSDKLIARKKDWDPKKYGGFDSPTVAYSVLVVAKVEKGKSKKLKSVKELLGITIMERSSFEKNPIDFLEAKGYKEVKKDLIIKLPKYSLFELENGRKRMLASAGELQKGNELALPSKYVNFLYLASHYEKLKGSPEDNEQKQLFVEQHKHYLDEIIEQISEFSKRVILADANLDKVLSAYNKHRDKPIREQAENIIHLFTLTNLGAPAAFKYFDTTIDRKRYTSTKEVLDATLIHQSITGLYETRIDLSQLGGDSGGSGGSGGSANELTWHDVLAEEKQQPYFLNTLQTVASERQSGVTIYPPQKDVFNAFRFTELGDVKVVILGQDPYHGPGQAHGLAFSVRPGIAIPPSLLNMYKELENTIPGFTRPNHGYLESWARQGVLLLNTVLTVRAGQAHSHASLGWETFTDKVISLINQHREGVVFLLWGSHAQKKGAIIDKQRHHVLKAPHPSPLSAHRGFFGCNHFVLANQWLEQRGETPIDWMPVLPAESESGGSKRTADGSEFEPKKKRKVGSGATNFSLLKQAGDVEENPGPMVSKGEELFTGVVPILVELDGDVNGHKFSVSGEGEGDATYGKLTLKFICTTGKLPVPWPTLVTTLTYGVQCFSRYPDHMKQHDFFKSAMPEGYVQERTIFFKDDGNYKTRAEVKFEGDTLVNRIELKGIDFKEDGNILGHKLEYNYNSHNVYIMADKQKNGIKVNFKIRHNIEDGSVQLADHYQQNTPIGDGPVLLPDNHYLSTQSALSKDPNEKRDHMVLLEFVTAAGITLGMDELYKSGGSPKKKRKV

SEQ ID NO: 188 - protein, 2313 aa, Artificial Sequence
  Description of Artificial Sequence: Synthetic polypeptide
MKRTADGSEFESPKKKRKVANELTWHDVLAEEKQQPYFLNTLQTVASERQSGVTIYPPQKDVFNAFRFTELGDVKVVILGQDPYHGPGQAHGLAFSVRPGIAIPPSLLNMYKELENTIPGFTRPNHGYLESWARQGVLLLNTVLTVRAGQAHSHASLGWETFTDKVISLINQHREGVVFLLWGSHAQKKGAIIDKQRHHVLKAPHPSPLSAHRGFFGCNHFVLANQWLEQRGETPIDWMPVLPAESESGGSGGSGGSSEVEFSHEYWMRHALTLAKRAWDEREVPVGAVLVHNNRVIGEGWNRPIGRHDPTAHAEIMALRQGGLVMQNYRLIDATLYVTLEPCVMCAGAMIHSRIGRVVFGARDAKTGAAGSLMDVLHHPGMNHRVEITEGILADECAALLSDFFRMRRQEIKAQKKAQSSTDSGGSSGGSSGSETPGTSESATPESSGGSSGGSSEVEFSHEYWMRHALTLAKRARDEREVPVGAVLVLNNRVIGEGWNRAIGLHDPTAHAEIMALRQGGLVMQNYRLIDATLYVTFEPCVMCAGAMIHSRIGRVVFGVRNAKTGAAGSLMDVLHYPGMNHRVEITEGILADECAALLCYFFRMPRQVFNAQKKAQSSTDSGGSSGGSSGSETPGTSESATPESSGGSSGGSDKKYSIGLAIGTNSVGWAVITDEYKVPSKKFKVLGNTDRHSIKKNLIGALLFDSGETAEATRLKRTARRRYTRRKNRICYLQEIFSNEMAKVDDSFFHRLEESFLVEEDKKHERHPIFGNIVDEVAYHEKYPTIYHLRKKLVDSTDKADLRLIYLALAHMIKFRGHFLIEGDLNPDNSDVDKLFIQLVQTYNQLFEENPINASGVDAKAILSARLSKSRRLENLIAQLPGEKKNGLFGNLIALSLGLTPNFKSNFDLAEDAKLQLSKDTYDDDLDNLLAQIGDQYADLFLAAKNLSDAILLSDILRVNTEITKAPLSASMIKRYDEHHQDLTLLKALVRQQLPEKYKEIFFDQSKNGYAGYIDGGASQEEFYKFIKPILEKMDGTEELLVKLNREDLLRKQRTFDNGSIPHQIHLGELHAILRRQEDFYPFLKDNREKIEKILTFRIPYYVGPLARGNSRFAWMTRKSEETITPWNFEEVVDKGASAQSFIERMTNFDKNLPNEKVLPKHSLLYEYFTVYNELTKVKYVTEGMRKPAFLSGEQKKAIVDLLFKTNRKVTVKQLKEDYFKKIECFDSVEISGVEDRFNASLGTYHDLLKIIKDKDFLDNEENEDILEDIVLTLTLFEDREMIEERLKTYAHLFDDKVMKQLKRRRYTGWGRLSRKLINGIRDKQSGKTILDFLKSDGFANRNFMQLIHDDSLTFKEDIQKAQVSGQGDSLHEHIANLAGSPAIKKGILQTVKVVDELVKVMGRHKPENIVIEMARENQTTQKGQKNSRERMKRIEEGIKELGSQILKEHPVENTQLQNEKLYLYYLQNGRDMYVDQELDINRLSDYDVDHIVPQSFLKDDSIDNKVLTRSDKNRGKSDNVPSEEVVKKMKNYWRQLLNAKLITQRKFDNLTKAERGGLSELDKAGFIKRQLVETRQITKHVAQILDSRMNTKYDENDKLIREVKVITLKSKLVSDFRKDFQFYKVREINNYHHAHDAYLNAVVGTALIKKYPKLESEFVYGDYKVYDVRKMIAKSEQEIGKATAKYFFYSNIMNFFKTEITLANGEIRKRPLIETNGETGEIVWDKGRDFATVRKVLSMPQVNIVKKTEVQTGGFSKESILPKRNSDKLIARKKDWDPKKYGGFDSPTVAYSVLVVAKVEKGKSKKLKSVKELLGITIMERSSFEKNPIDFLEAKGYKEVKKDLIIKLPKYSLFELENGRKRMLASAGELQKGNELALPSKYVNFLYLASHYEKLKGSPEDNEQKQLFVEQHKHYLDEIIEQISEFSKRVILADANLDKVLSAYNKHRDKPIREQAENIIHLFTLTNLGAPAAFKYFDTTIDRKRYTSTKEVLDATLIHQSITGLYETRIDLSQLGGDSGGSKRTADGSEFEPKKKRKVGSGATNFSLLKQAGDVEENPGPMVSKGEELFTGVVPILVELDGDVNGHKFSVSGEGEGDATYGKLTLKFICTTGKLPVPWPTLVTTLTYGVQCFSRYPDHMKQHDFFKSAMPEGYVQERTIFFKDDGNYKTRAEVKFEGDTLVNRIELKGIDFKEDGNILGHKLEYNYNSHNVYIMADKQKNGIKVNFKIRHNIEDGSVQLADHYQQNTPIGDGPVLLPDNHYLSTQSALSKDPNEKRDHMVLLEFVTAAGITLGMDELYKSGGSPKKKRKV

SEQ ID NO: 189 - protein, 2115 aa, Artificial Sequence
  Description of Artificial Sequence: Synthetic polypeptide
MKRTADGSEFESPKKKRKVANELTWHDVLAEEKQQPYFLNTLQTVASERQSGVTIYPPQKDVFNAFRFTELGDVKVVILGQDPYHGPGQAHGLAFSVRPGIAIPPSLLNMYKELENTIPGFTRPNHGYLESWARQGVLLLNTVLTVRAGQAHSHASLGWETFTDKVISLINQHREGVVFLLWGSHAQKKGAIIDKQRHHVLKAPHPSPLSAHRGFFGCNHFVLANQWLEQRGETPIDWMPVLPAESESGGSGGSGGSSEVEFSHEYWMRHALTLAKRARDEREVPVGAVLVLNNRVIGEGWNRAIGLHDPTAHAEIMALRQGGLVMQNYRLIDATLYGTFEPCVMCAGAMIHSRIGRVVFGVRNAKTGAAGSLMDVLHYPGMNHRVEITEGILADECAALLCYFFRMPRQVFNAQKKAQSSTDSGGSSGGSSGSETPGTSESATPESSGGSSGGSDKKYSIGLAIGTNSVGWAVITDEYKVPSKKFKVLGNTDRHSIKKNLIGALLFDSGETAEATRLKRTARRRYTRRKNRICYLQEIFSNEMAKVDDSFFHRLEESFLVEEDKKHERHPIFGNIVDEVAYHEKYPTIYHLRKKLVDSTDKADLRLIYLALAHMIKFRGHFLIEGDLNPDNSDVDKLFIQLVQTYNQLFEENPINASGVDAKAILSARLSKSRRLENLIAQLPGEKKNGLFGNLIALSLGLTPNFKSNFDLAEDAKLQLSKDTYDDDLDNLLAQIGDQYADLFLAAKNLSDAILLSDILRVNTEITKAPLSASMIKRYDEHHQDLTLLKALVRQQLPEKYKEIFFDQSKNGYAGYIDGGASQEEFYKFIKPILEKMDGTEELLVKLNREDLLRKQRTFDNGSIPHQIHLGELHAILRRQEDFYPFLKDNREKIEKILTFRIPYYVGPLARGNSRFAWMTRKSEETITPWNFEEVVDKGASAQSFIERMTNFDKNLPNEKVLPKHSLLYEYFTVYNELTKVKYVTEGMRKPAFLSGEQKKAIVDLLFKTNRKVTVKQLKEDYFKKIECFDSVEISGVEDRFNASLGTYHDLLKIIKDKDFLDNEENEDILEDIVLTLTLFEDREMIEERLKTYAHLFDDKVMKQLKRRRYTGWGRLSRKLINGIRDKQSGKTILDFLKSDGFANRNFMQLIHDDSLTFKEDIQKAQVSGQGDSLHEHIANLAGSPAIKKGILQTVKVVDELVKVMGRHKPENIVIEMARENQTTQKGQKNSRERMKRIEEGIKELGSQILKEHPVENTQLQNEKLYLYYLQNGRDMYVDQELDINRLSDYDVDHIVPQSFLKDDSIDNKVLTRSDKNRGKSDNVPSEEVVKKMKNYWRQLLNAKLITQRKFDNLTKAERGGLSELDKAGFIKRQLVETRQITKHVAQILDSRMNTKYDENDKLIREVKVITLKSKLVSDFRKDFQFYKVREINNYHHAHDAYLNAVVGTALIKKYPKLESEFVYGDYKVYDVRKMIAKSEQEIGKATAKYFFYSNIMNFFKTEITLANGEIRKRPLIETNGETGEIVWDKGRDFATVRKVLSMPQVNIVKKTEVQTGGFSKESILPKRNSDKLIARKKDWDPKKYGGFDSPTVAYSVLVVAKVEKGKSKKLKSVKELLGITIMERSSFEKNPIDFLEAKGYKEVKKDLIIKLPKYSLFELENGRKRMLASAGELQKGNELALPSKYVNFLYLASHYEKLKGSPEDNEQKQLFVEQHKHYLDEIIEQISEFSKRVILADANLDKVLSAYNKHRDKPIREQAENIIHLFTLTNLGAPAAFKYFDTTIDRKRYTSTKEVLDATLIHQSITGLYETRIDLSQLGGDSGGSKRTADGSEFEPKKKRKVGSGATNFSLLKQAGDVEENPGPMVSKGEELFTGVVPILVELDGDVNGHKFSVSGEGEGDATYGKLTLKFICTTGKLPVPWPTLVTTLTYGVQCFSRYPDHMKQHDFFKSAMPEGYVQERTIFFKDDGNYKTRAEVKFEGDTLVNRIELKGIDFKEDGNILGHKLEYNYNSHNVYIMADKQKNGIKVNFKIRHNIEDGSVQLADHYQQNTPIGDGPVLLPDNHYLSTQSALSKDPNEKRDHMVLLEFVTAAGITLGMDELYKSGGSPKKKRKV

SEQ ID NO: 190 - protein, 1949 aa, Artificial Sequence
  Description of Artificial Sequence: Synthetic polypeptide
MKRTADGSEFESPKKKRKVANELTWHDVLAEEKQQPYFLNTLQTVASERQSGVTIYPPQKDVFNAFRFTELGDVKVVILGQDPYHGPGQAHGLAFSVRPGIAIPPSLLNMYKELENTIPGFTRPNHGYLESWARQGVLLLNTVLTVRAGQAHSHASLGWETFTDKVISLINQHREGVVFLLWGSHAQKKGAIIDKQRHHVLKAPHPSPLSAHRGFFGCNHFVLANQWLEQRGETPIDWMPVLPAESESGGSGGSGGSSGGSSGGSSGSETPGTSESATPESSGGSSGGSDKKYSIGLAIGTNSVGWAVITDEYKVPSKKFKVLGNTDRHSIKKNLIGALLFDSGETAEATRLKRTARRRYTRRKNRICYLQEIFSNEMAKVDDSFFHRLEESFLVEEDKKHERHPIFGNIVDEVAYHEKYPTIYHLRKKLVDSTDKADLRLIYLALAHMIKFRGHFLIEGDLNPDNSDVDKLFIQLVQTYNQLFEENPINASGVDAKAILSARLSKSRRLENLIAQLPGEKKNGLFGNLIALSLGLTPNFKSNFDLAEDAKLQLSKDTYDDDLDNLLAQIGDQYADLFLAAKNLSDAILLSDILRVNTEITKAPLSASMIKRYDEHHQDLTLLKALVRQQLPEKYKEIFFDQSKNGYAGYIDGGASQEEFYKFIKPILEKMDGTEELLVKLNREDLLRKQRTFDNGSIPHQIHLGELHAILRRQEDFYPFLKDNREKIEKILTFRIPYYVGPLARGNSRFAWMTRKSEETITPWNFEEVVDKGASAQSFIERMTNFDKNLPNEKVLPKHSLLYEYFTVYNELTKVKYVTEGMRKPAFLSGEQKKAIVDLLFKTNRKVTVKQLKEDYFKKIECFDSVEISGVEDRFNASLGTYHDLLKIIKDKDFLDNEENEDILEDIVLTLTLFEDREMIEERLKTYAHLFDDKVMKQLKRRRYTGWGRLSRKLINGIRDKQSGKTILDFLKSDGFANRNFMQLIHDDSLTFKEDIQKAQVSGQGDSLHEHIANLAGSPAIKKGILQTVKVVDELVKVMGRHKPENIVIEMARENQTTQKGQKNSRERMKRIEEGIKELGSQILKEHPVENTQLQNEKLYLYYLQNGRDMYVDQELDINRLSDYDVDHIVPQSFLKDDSIDNKVLTRSDKNRGKSDNVPSEEVVKKMKNYWRQLLNAKLITQRKFDNLTKAERGGLSELDKAGFIKRQLVETRQITKHVAQILDSRMNTKYDENDKLIREVKVITLKSKLVSDFRKDFQFYKVREINNYHHAHDAYLNAVVGTALIKKYPKLESEFVYGDYKVYDVRKMIAKSEQEIGKATAKYFFYSNIMNFFKTEITLANGEIRKRPLIETNGETGEIVWDKGRDFATVRKVLSMPQVNIVKKTEVQTGGFSKESILPKRNSDKLIARKKDWDPKKYGGFDSPTVAYSVLVVAKVEKGKSKKLKSVKELLGITIMERSSFEKNPIDFLEAKGYKEVKKDLIIKLPKYSLFELENGRKRMLASAGELQKGNELALPSKYVNFLYLASHYEKLKGSPEDNEQKQLFVEQHKHYLDEIIEQISEFSKRVILADANLDKVLSAYNKHRDKPIREQAENIIHLFTLTNLGAPAAFKYFDTTIDRKRYTSTKEVLDATLIHQSITGLYETRIDLSQLGGDSGGSKRTADGSEFEPKKKRKVGSGATNFSLLKQAGDVEENPGPMVSKGEELFTGVVPILVELDGDVNGHKFSVSGEGEGDATYGKLTLKFICTTGKLPVPWPTLVTTLTYGVQCFSRYPDHMKQHDFFKSAMPEGYVQERTIFFKDDGNYKTRAEVKFEGDTLVNRIELKGIDFKEDGNILGHKLEYNYNSHNVYIMADKQKNGIKVNFKIRHNIEDGSVQLADHYQQNTPIGDGPVLLPDNHYLSTQSALSKDPNEKRDHMVLLEFVTAAGITLGMDELYKSGGSPKKKRKV

SEQ ID NO: 191 - protein, 2397 aa, Artificial Sequence
  Description of Artificial Sequence: Synthetic polypeptide
MKRTADGSEFESPKKKRKVSEVEFSHEYWMRHALTLAKRAWDEREVPVGAVLVHNNRVIGEGWNRPIGRHDPTAHAEIMALRQGGLVMQNYRLIDATLYVTLEPCVMCAGAMIHSRIGRVVFGARDAKTGAAGSLMDVLHHPGMNHRVEITEGILADECAALLSDFFRMRRQEIKAQKKAQSSTDSGGSSGGSSGSETPGTSESATPESSGGSSGGSSEVEFSHEYWMRHALTLAKRARDEREVPVGAVLVLNNRVIGEGWNRAIGLHDPTAHAEIMALRQGGLVMQNYRLIDATLYVTFEPCVMCAGAMIHSRIGRVVFGVRNAKTGAAGSLMDVLHYPGMNHRVEITEGILADECAALLCYFFRMPRQVFNAQKKAQSSTDSGGSSGGSSGSETPGTSESATPESSGGSSGGSDKKYSIGLAIGTNSVGWAVITDEYKVPSKKFKVLGNTDRHSIKKNLIGALLFDSGETAEATRLKRTARRRYTRRKNRICYLQEIFSNEMAKVDDSFFHRLEESFLVEEDKKHERHPIFGNIVDEVAYHEKYPTIYHLRKKLVDSTDKADLRLIYLALAHMIKFRGHFLIEGDLNPDNSDVDKLFIQLVQTYNQLFEENPINASGVDAKAILSARLSKSRRLENLIAQLPGEKKNGLFGNLIALSLGLTPNFKSNFDLAEDAKLQLSKDTYDDDLDNLLAQIGDQYADLFLAAKNLSDAILLSDILRVNTEITKAPLSASMIKRYDEHHQDLTLLKALVRQQLPEKYKEIFFDQSKNGYAGYIDGGASQEEFYKFIKPILEKMDGTEELLVKLNREDLLRKQRTFDNGSIPHQIHLGELHAILRRQEDFYPFLKDNREKIEKILTFRIPYYVGPLARGNSRFAWMTRKSEETITPWNFEEVVDKGASAQSFIERMTNFDKNLPNEKVLPKHSLLYEYFTVYNELTKVKYVTEGMRKPAFLSGEQKKAIVDLLFKTNRKVTVKQLKEDYFKKIECFDSVEISGVEDRFNASLGTYHDLLKIIKDKDFLDNEENEDILEDIVLTLTLFEDREMIEERLKTYAHLFDDKVMKQLKRRRYTGWGRLSRKLINGIRDKQSGKTILDFLKSDGFANRNFMQLIHDDSLTFKEDIQKAQVSGQGDSLHEHIANLAGSPAIKKGILQTVKVVDELVKVMGRHKPENIVIEMARENQTTQKGQKNSRERMKRIEEGIKELGSQILKEHPVENTQLQNEKLYLYYLQNGRDMYVDQELDINRLSDYDVDHIVPQSFLKDDSIDNKVLTRSDKNRGKSDNVPSEEVVKKMKNYWRQLLNAKLITQRKFDNLTKAERGGLSELDKAGFIKRQLVETRQITKHVAQILDSRMNTKYDENDKLIREVKVITLKSKLVSDFRKDFQFYKVREINNYHHAHDAYLNAVVGTALIKKYPKLESEFVYGDYKVYDVRKMIAKSEQEIGKATAKYFFYSNIMNFFKTEITLANGEIRKRPLIETNGETGEIVWDKGRDFATVRKVLSMPQVNIVKKTEVQTGGFSKESILPKRNSDKLIARKKDWDPKKYGGFDSPTVAYSVLVVAKVEKGKSKKLKSVKELLGITIMERSSFEKNPIDFLEAKGYKEVKKDLIIKLPKYSLFELENGRKRMLASAGELQKGNELALPSKYVNFLYLASHYEKLKGSPEDNEQKQLFVEQHKHYLDEIIEQISEFSKRVILADANLDKVLSAYNKHRDKPIREQAENIIHLFTLTNLGAPAAFKYFDTTIDRKRYTSTKEVLDATLIHQSITGLYETRIDLSQLGGDSGGSGGSGGSIGQKTLYSFFSPSPARKRHAPSPEPAVQGTGVAGVPEESGDAAAIPAKKAPAGQEEPGTPPSSPLSAEQLDRIQRNKAAALLRLAARNVPVGFGESWKKHLSGEFGKPYFIKLMGFVAEERKHYTVYPPPHQVFTWTQMCDIKDVKVVILGQDPYHGPNQAHGLCFSVQRPVPPPPSLENIYKELSTDIEDFVHPGHGDLSGWAKQGVLLLNAVLTVRAHQANSHKERGWEQFTDAVVSWLNQNSNGLVFLLWGSYAQKKGSAIDRKRHHVLQTAHPSPLSVYRGFFGCRHFSKTNELLQKSGKKPIDWKELSGGSKRTADGSEFEPKKKRKVGSGATNFSLLKQAGDVEENPGPMVSKGEELFTGVVPILVELDGDVNGHKFSVSGEGEGDATYGKLTLKFICTTGKLPVPWPTLVTTLTYGVQCFSRYPDHMKQHDFFKSAMPEGYVQERTIFFKDDGNYKTRAEVKFEGDTLVNRIELKGIDFKEDGNILGHKLEYNYNSHNVYIMADKQKNGIKVNFKIRHNIEDGSVQLADHYQQNTPIGDGPVLLPDNHYLSTQSALSKDPNEKRDHMVLLEFVTAAGITLGMDELYKSGGSPKKKRKV

SEQ ID NO: 192 - protein, 2199 aa, Artificial Sequence
  Description of Artificial Sequence: Synthetic polypeptide
MKRTADGSEFESPKKKRKVSEVEFSHEYWMRHALTLAKRARDEREVPVGAVLVLNNRVIGEGWNRAIGLHDPTAHAEIMALRQGGLVMQNYRLIDATLYGTFEPCVMCAGAMIHSRIGRVVFGVRNAKTGAAGSLMDVLHYPGMNHRVEITEGILADECAALLCYFFRMPRQVFNAQKKAQSSTDSGGSSGGSSGSETPGTSESATPESSGGSSGGSDKKYSIGLAIGTNSVGWAVITDEYKVPSKKFKVLGNTDRHSIKKNLIGALLFDSGETAEATRLKRTARRRYTRRKNRICYLQEIFSNEMAKVDDSFFHRLEESFLVEEDKKHERHPIFGNIVDEVAYHEKYPTIYHLRKKLVDSTDKADLRLIYLALAHMIKFRGHFLIEGDLNPDNSDVDKLFIQLVQTYNQLFEENPINASGVDAKAILSARLSKSRRLENLIAQLPGEKKNGLFGNLIALSLGLTPNFKSNFDLAEDAKLQLSKDTYDDDLDNLLAQIGDQYADLFLAAKNLSDAILLSDILRVNTEITKAPLSASMIKRYDEHHQDLTLLKALVRQQLPEKYKEIFFDQSKNGYAGYIDGGASQEEFYKFIKPILEKMDGTEELLVKLNREDLLRKQRTFDNGSIPHQIHLGELHAILRRQEDFYPFLKDNREKIEKILTFRIPYYVGPLARGNSRFAWMTRKSEETITPWNFEEVVDKGASAQSFIERMTNFDKNLPNEKVLPKHSLLYEYFTVYNELTKVKYVTEGMRKPAFLSGEQKKAIVDLLFKTNRKVTVKQLKEDYFKKIECFDSVEISGVEDRFNASLGTYHDLLKIIKDKDFLDNEENEDILEDIVLTLTLFEDREMIEERLKTYAHLFDDKVMKQLKRRRYTGWGRLSRKLINGIRDKQSGKTILDFLKSDGFANRNFMQLIHDDSLTFKEDIQKAQVSGQGDSLHEHIANLAGSPAIKKGILQTVKVVDELVKVMGRHKPENIVIEMARENQTTQKGQKNSRERMKRIEEGIKELGSQILKEHPVENTQLQNEKLYLYYLQNGRDMYVDQELDINRLSDYDVDHIVPQSFLKDDSIDNKVLTRSDKNRGKSDNVPSEEVVKKMKNYWRQLLNAKLITQRKFDNLTKAERGGLSELDKAGFIKRQLVETRQITKHVAQILDSRMNTKYDENDKLIREVKVITLKSKLVSDFRKDFQFYKVREINNYHHAHDAYLNAVVGTALIKKYPKLESEFVYGDYKVYDVRKMIAKSEQEIGKATAKYFFYSNIMNFFKTEITLANGEIRKRPLIETNGETGEIVWDKGRDFATVRKVLSMPQVNIVKKTEVQTGGFSKESILPKRNSDKLIARKKDWDPKKYGGFDSPTVAYSVLVVAKVEKGKSKKLKSVKELLGITIMERSSFEKNPIDFLEAKGYKEVKKDLIIKLPKYSLFELENGRKRMLASAGELQKGNELALPSKYVNFLYLASHYEKLKGSPEDNEQKQLFVEQHKHYLDEIIEQISEFSKRVILADANLDKVLSAYNKHRDKPIREQAENIIHLFTLTNLGAPAAFKYFDTTIDRKRYTSTKEVLDATLIHQSITGLYETRIDLSQLGGDSGGSGGSGGSIGQKTLYSFFSPSPARKRHAPSPEPAVQGTGVAGVPEESGDAAAIPAKKAPAGQEEPGTPPSSPLSAEQLDRIQRNKAAALLRLAARNVPVGFGESWKKHLSGEFGKPYFIKLMGFVAEERKHYTVYPPPHQVFTWTQMCDIKDVKVVILGQDPYHGPNQAHGLCFSVQRPVPPPPSLENIYKELSTDIEDFVHPGHGDLSGWAKQGVLLLNAVLTVRAHQANSHKERGWEQFTDAVVSWLNQNSNGLVFLLWGSYAQKKGSAIDRKRHHVLQTAHPSPLSVYRGFFGCRHFSKTNELLQKSGKKPIDWKELSGGSKRTADGSEFEPKKKRKVGSGATNFSLLKQAGDVEENPGPMVSKGEELFTGVVPILVELDGDVNGHKFSVSGEGEGDATYGKLTLKFICTTGKLPVPWPTLVTTLTYGVQCFSRYPDHMKQHDFFKSAMPEGYVQERTIFFKDDGNYKTRAEVKFEGDTLVNRIELKGIDFKEDGNILGHKLEYNYNSHNVYIMADKQKNGIKVNFKIRHNIEDGSVQLADHYQQNTPIGDGPVLLPDNHYLSTQSALSKDPNEKRDHMVLLEFVTAAGITLGMDELYKSGGSPKKKRKV

SEQ ID NO: 193 - protein, 2033 aa, Artificial Sequence
  Description of Artificial Sequence: Synthetic polypeptide
MKRTADGSEFESPKKKRKVSGGSSGGSSGSETPGTSESATPESSGGSSGGSDKKYSIGLAIGTNSVGWAVITDEYKVPSKKFKVLGNTDRHSIKKNLIGALLFDSGETAEATRLKRTARRRYTRRKNRICYLQEIFSNEMAKVDDSFFHRLEESFLVEEDKKHERHPIFGNIVDEVAYHEKYPTIYHLRKKLVDSTDKADLRLIYLALAHMIKFRGHFLIEGDLNPDNSDVDKLFIQLVQTYNQLFEENPINASGVDAKAILSARLSKSRRLENLIAQLPGEKKNGLFGNLIALSLGLTPNFKSNFDLAEDAKLQLSKDTYDDDLDNLLAQIGDQYADLFLAAKNLSDAILLSDILRVNTEITKAPLSASMIKRYDEHHQDLTLLKALVRQQLPEKYKEIFFDQSKNGYAGYIDGGASQEEFYKFIKPILEKMDGTEELLVKLNREDLLRKQRTFDNGSIPHQIHLGELHAILRRQEDFYPFLKDNREKIEKILTFRIPYYVGPLARGNSRFAWMTRKSEETITPWNFEEVVDKGASAQSFIERMTNFDKNLPNEKVLPKHSLLYEYFTVYNELTKVKYVTEGMRKPAFLSGEQKKAIVDLLFKTNRKVTVKQLKEDYFKKIECFDSVEISGVEDRFNASLGTYHDLLKIIKDKDFLDNEENEDILEDIVLTLTLFEDREMIEERLKTYAHLFDDKVMKQLKRRRYTGWGRLSRKLINGIRDKQSGKTILDFLKSDGFANRNFMQLIHDDSLTFKEDIQKAQVSGQGDSLHEHIANLAGSPAIKKGILQTVKVVDELVKVMGRHKPENIVIEMARENQTTQKGQKNSRERMKRIEEGIKELGSQILKEHPVENTQLQNEKLYLYYLQNGRDMYVDQELDINRLSDYDVDHIVPQSFLKDDSIDNKVLTRSDKNRGKSDNVPSEEVVKKMKNYWRQLLNAKLITQRKFDNLTKAERGGLSELDKAGFIKRQLVETRQITKHVAQILDSRMNTKYDENDKLIREVKVITLKSKLVSDFRKDFQFYKVREINNYHHAHDAYLNAVVGTALIKKYPKLESEFVYGDYKVYDVRKMIAKSEQEIGKATAKYFFYSNIMNFFKTEITLANGEIRKRPLIETNGETGEIVWDKGRDFATVRKVLSMPQVNIVKKTEVQTGGFSKESILPKRNSDKLIARKKDWDPKKYGGFDSPTVAYSVLVVAKVEKGKSKKLKSVKELLGITIMERSSFEKNPIDFLEAKGYKEVKKDLIIKLPKYSLFELENGRKRMLASAGELQKGNELALPSKYVNFLYLASHYEKLKGSPEDNEQKQLFVEQHKHYLDEIIEQISEFSKRVILADANLDKVLSAYNKHRDKPIREQAENIIHLFTLTNLGAPAAFKYFDTTIDRKRYTSTKEVLDATLIHQSITGLYETRIDLSQLGGDSGGSGGSGGSIGQKTLYSFFSPSPARKRHAPSPEPAVQGTGVAGVPEESGDAAAIPAKKAPAGQEEPGTPPSSPLSAEQLDRIQRNKAAALLRLAARNVPVGFGESWKKHLSGEFGKPYFIKLMGFVAEERKHYTVYPPPHQVFTWTQMCDIKDVKVVILGQDPYHGPNQAHGLCFSVQRPVPPPPSLENIYKELSTDIEDFVHPGHGDLSGWAKQGVLLLNAVLTVRAHQANSHKERGWEQFTDAVVSWLNQNSNGLVFLLWGSYAQKKGSAIDRKRHHVLQTAHPSPLSVYRGFFGCRHFSKTNELLQKSGKKPIDWKELSGGSKRTADGSEFEPKKKRKVGSGATNFSLLKQAGDVEENPGPMVSKGEELFTGVVPILVELDGDVNGHKFSVSGEGEGDATYGKLTLKFICTTGKLPVPWPTLVTTLTYGVQCFSRYPDHMKQHDFFKSAMPEGYVQERTIFFKDDGNYKTRAEVKFEGDTLVNRIELKGIDFKEDGNILGHKLEYNYNSHNVYIMADKQKNGIKVNFKIRHNIEDGSVQLADHYQQNTPIGDGPVLLPDNHYLSTQSALSKDPNEKRDHMVLLEFVTAAGITLGMDELYKSGGSPKKKRKV

SEQ ID NO: 194 - protein, 2397 aa, Artificial Sequence
  Description of Artificial Sequence: Synthetic polypeptide
MKRTADGSEFESPKKKRKVIGQKTLYSFFSPSPARKRHAPSPEPAVQGTGVAGVPEESGDAAAIPAKKAPAGQEEPGTPPSSPLSAEQLDRIQRNKAAALLRLAARNVPVGFGESWKKHLSGEFGKPYFIKLMGFVAEERKHYTVYPPPHQVFTWTQMCDIKDVKVVILGQDPYHGPNQAHGLCFSVQRPVPPPPSLENIYKELSTDIEDFVHPGHGDLSGWAKQGVLLLNAVLTVRAHQANSHKERGWEQFTDAVVSWLNQNSNGLVFLLWGSYAQKKGSAIDRKRHHVLQTAHPSPLSVYRGFFGCRHFSKTNELLQKSGKKPIDWKELSGGSGGSGGSSEVEFSHEYWMRHALTLAKRAWDEREVPVGAVLVHNNRVIGEGWNRPIGRHDPTAHAEIMALRQGGLVMQNYRLIDATLYVTLEPCVMCAGAMIHSRIGRVVFGARDAKTGAAGSLMDVLHHPGMNHRVEITEGILADECAALLSDFFRMRRQEIKAQKKAQSSTDSGGSSGGSSGSETPGTSESATPESSGGSSGGSSEVEFSHEYWMRHALTLAKRARDEREVPVGAVLVLNNRVIGEGWNRAIGLHDPTAHAEIMALRQGGLVMQNYRLIDATLYVTFEPCVMCAGAMIHSRIGRVVFGVRNAKTGAAGSLMDVLHYPGMNHRVEITEGILADECAALLCYFFRMPRQVFNAQKKAQSSTDSGGSSGGSSGSETPGTSESATPESSGGSSGGSDKKYSIGLAIGTNSVGWAVITDEYKVPSKKFKVLGNTDRHSIKKNLIGALLFDSGETAEATRLKRTARRRYTRRKNRICYLQEIFSNEMAKVDDSFFHRLEESFLVEEDKKHERHPIFGNIVDEVAYHEKYPTIYHLRKKLVDSTDKADLRLIYLALAHMIKFRGHFLIEGDLNPDNSDVDKLFIQLVQTYNQLFEENPINASGVDAKAILSARLSKSRRLENLIAQLPGEKKNGLFGNLIALSLGLTPNFKSNFDLAEDAKLQLSKDTYDDDLDNLLAQIGDQYADLFLAAKNLSDAILLSDILRVNTEITKAPLSASMIKRYDEHHQDLTLLKALVRQQLPEKYKEIFFDQSKNGYAGYIDGGASQEEFYKFIKPILEKMDGTEELLVKLNREDLLRKQRTFDNGSIPHQIHLGELHAILRRQEDFYPFLKDNREKIEKILTFRIPYYVGPLARGNSRFAWMTRKSEETITPWNFEEVVDKGASAQSFIERMTNFDKNLPNEKVLPKHSLLYEYFTVYNELTKVKYVTEGMRKPAFLSGEQKKAIVDLLFKTNRKVTVKQLKEDYFKKIECFDSVEISGVEDRFNASLGTYHDLLKIIKDKDFLDNEENEDILEDIVLTLTLFEDREMIEERLKTYAHLFDDKVMKQLKRRRYTGWGRLSRKLINGIRDKQSGKTILDFLKSDGFANRNFMQLIHDDSLTFKEDIQKAQVSGQGDSLHEHIANLAGSPAIKKGILQTVKVVDELVKVMGRHKPENIVIEMARENQTTQKGQKNSRERMKRIEEGIKELGSQILKEHPVENTQLQNEKLYLYYLQNGRDMYVDQELDINRLSDYDVDHIVPQSFLKDDSIDNKVLTRSDKNRGKSDNVPSEEVVKKMKNYWRQLLNAKLITQRKFDNLTKAERGGLSELDKAGFIKRQLVETRQITKHVAQILDSRMNTKYDENDKLIREVKVITLKSKLVSDFRKDFQFYKVREINNYHHAHDAYLNAVVGTALIKKYPKLESEFVYGDYKVYDVRKMIAKSEQEIGKATAKYFFYSNIMNFFKTEITLANGEIRKRPLIETNGETGEIVWDKGRDFATVRKVLSMPQVNIVKKTEVQTGGFSKESILPKRNSDKLIARKKDWDPKKYGGFDSPTVAYSVLVVAKVEKGKSKKLKSVKELLGITIMERSSFEKNPIDFLEAKGYKEVKKDLIIKLPKYSLFELENGRKRMLASAGELQKGNELALPSKYVNFLYLASHYEKLKGSPEDNEQKQLFVEQHKHYLDEIIEQISEFSKRVILADANLDKVLSAYNKHRDKPIREQAENIIHLFTLTNLGAPAAFKYFDTTIDRKRYTSTKEVLDATLIHQSITGLYETRIDLSQLGGDSGGSKRTADGSEFEPKKKRKVGSGATNFSLLKQAGDVEENPGPMVSKGEELFTGVVPILVELDGDVNGHKFSVSGEGEGDATYGKLTLKFICTTGKLPVPWPTLVTTLTYGVQCFSRYPDHMKQHDFFKSAMPEGYVQERTIFFKDDGNYKTRAEVKFEGDTLVNRIELKGIDFKEDGNILGHKLEYNYNSHNVYIMADKQKNGIKVNFKIRHNIEDGSVQLADHYQQNTPIGDGPVLLPDNHYLSTQSALSKDPNEKRDHMVLLEFVTAAGITLGMDELYKSGGSPKKKRKV

SEQ ID NO: 195 - protein, 2199 aa, Artificial Sequence
  Description of Artificial Sequence: Synthetic polypeptide
MKRTADGSEFESPKKKRKVIGQKTLYSFFSPSPARKRHAPSPEPAVQGTGVAGVPEESGDAAAIPAKKAPAGQEEPGTPPSSPLSAEQLDRIQRNKAAALLRLAARNVPVGFGESWKKHLSGEFGKPYFIKLMGFVAEERKHYTVYPPPHQVFTWTQMCDIKDVKVVILGQDPYHGPNQAHGLCFSVQRPVPPPPSLENIYKELSTDIEDFVHPGHGDLSGWAKQGVLLLNAVLTVRAHQANSHKERGWEQFTDAVVSWLNQNSNGLVFLLWGSYAQKKGSAIDRKRHHVLQTAHPSPLSVYRGFFGCRHFSKTNELLQKSGKKPIDWKELSGGSGGSGGSSEVEFSHEYWMRHALTLAKRARDEREVPVGAVLVLNNRVIGEGWNRAIGLHDPTAHAEIMALRQGGLVMQNYRLIDATLYGTFEPCVMCAGAMIHSRIGRVVFGVRNAKTGAAGSLMDVLHYPGMNHRVEITEGILADECAALLCYFFRMPRQVFNAQKKAQSSTDSGGSSGGSSGSETPGTSESATPESSGGSSGGSDKKYSIGLAIGTNSVGWAVITDEYKVPSKKFKVLGNTDRHSIKKNLIGALLFDSGETAEATRLKRTARRRYTRRKNRICYLQEIFSNEMAKVDDSFFHRLEESFLVEEDKKHERHPIFGNIVDEVAYHEKYPTIYHLRKKLVDSTDKADLRLIYLALAHMIKFRGHFLIEGDLNPDNSDVDKLFIQLVQTYNQLFEENPINASGVDAKAILSARLSKSRRLENLIAQLPGEKKNGLFGNLIALSLGLTPNFKSNFDLAEDAKLQLSKDTYDDDLDNLLAQIGDQYADLFLAAKNLSDAILLSDILRVNTEITKAPLSASMIKRYDEHHQDLTLLKALVRQQLPEKYKEIFFDQSKNGYAGYIDGGASQEEFYKFIKPILEKMDGTEELLVKLNREDLLRKQRTFDNGSIPHQIHLGELHAILRRQEDFYPFLKDNREKIEKILTFRIPYYVGPLARGNSRFAWMTRKSEETITPWNFEEVVDKGASAQSFIERMTNFDKNLPNEKVLPKHSLLYEYFTVYNELTKVKYVTEGMRKPAFLSGEQKKAIVDLLFKTNRKVTVKQLKEDYFKKIECFDSVEISGVEDRFNASLGTYHDLLKIIKDKDFLDNEENEDILEDIVLTLTLFEDREMIEERLKTYAHLFDDKVMKQLKRRRYTGWGRLSRKLINGIRDKQSGKTILDFLKSDGFANRNFMQLIHDDSLTFKEDIQKAQVSGQGDSLHEHIANLAGSPAIKKGILQTVKVVDELVKVMGRHKPENIVIEMARENQTTQKGQKNSRERMKRIEEGIKELGSQILKEHPVENTQLQNEKLYLYYLQNGRDMYVDQELDINRLSDYDVDHIVPQSFLKDDSIDNKVLTRSDKNRGKSDNVPSEEVVKKMKNYWRQLLNAKLITQRKFDNLTKAERGGLSELDKAGFIKRQLVETRQITKHVAQILDSRMNTKYDENDKLIREVKVITLKSKLVSDFRKDFQFYKVREINNYHHAHDAYLNAVVGTALIKKYPKLESEFVYGDYKVYDVRKMIAKSEQEIGKATAKYFFYSNIMNFFKTEITLANGEIRKRPLIETNGETGEIVWDKGRDFATVRKVLSMPQVNIVKKTEVQTGGFSKESILPKRNSDKLIARKKDWDPKKYGGFDSPTVAYSVLVVAKVEKGKSKKLKSVKELLGITIMERSSFEKNPIDFLEAKGYKEVKKDLIIKLPKYSLFELENGRKRMLASAGELQKGNELALPSKYVNFLYLASHYEKLKGSPEDNEQKQLFVEQHKHYLDEIIEQISEFSKRVILADANLDKVLSAYNKHRDKPIREQAENIIHLFTLTNLGAPAAFKYFDTTIDRKRYTSTKEVLDATLIHQSITGLYETRIDLSQLGGDSGGSKRTADGSEFEPKKKRKVGSGATNFSLLKQAGDVEENPGPMVSKGEELFTGVVPILVELDGDVNGHKFSVSGEGEGDATYGKLTLKFICTTGKLPVPWPTLVTTLTYGVQCFSRYPDHMKQHDFFKSAMPEGYVQERTIFFKDDGNYKTRAEVKFEGDTLVNRIELKGIDFKEDGNILGHKLEYNYNSHNVYIMADKQKNGIKVNFKIRHNIEDGSVQLADHYQQNTPIGDGPVLLPDNHYLSTQSALSKDPNEKRDHMVLLEFVTAAGITLGMDELYKSGGSPKKKRKV

SEQ ID NO: 196 - protein, 2033 aa, Artificial Sequence
  Description of Artificial Sequence: Synthetic polypeptide
MKRTADGSEFESPKKKRKVIGQKTLYSFFSPSPARKRHAPSPEPAVQGTGVAGVPEESGDAAAIPAKKAPAGQEEPGTPPSSPLSAEQLDRIQRNKAAALLRLAARNVPVGFGESWKKHLSGEFGKPYFIKLMGFVAEERKHYTVYPPPHQVFTWTQMCDIKDVKVVILGQDPYHGPNQAHGLCFSVQRPVPPPPSLENIYKELSTDIEDFVHPGHGDLSGWAKQGVLLLNAVLTVRAHQANSHKERGWEQFTDAVVSWLNQNSNGLVFLLWGSYAQKKGSAIDRKRHHVLQTAHPSPLSVYRGFFGCRHFSKTNELLQKSGKKPIDWKELSGGSGGSGGSSGGSSGGSSGSETPGTSESATPESSGGSSGGSDKKYSIGLAIGTNSVGWAVITDEYKVPSKKFKVLGNTDRHSIKKNLIGALLFDSGETAEATRLKRTARRRYTRRKNRICYLQEIFSNEMAKVDDSFFHRLEESFLVEEDKKHERHPIFGNIVDEVAYHEKYPTIYHLRKKLVDSTDKADLRLIYLALAHMIKFRGHFLIEGDLNPDNSDVDKLFIQLVQTYNQLFEENPINASGVDAKAILSARLSKSRRLENLIAQLPGEKKNGLFGNLIALSLGLTPNFKSNFDLAEDAKLQLSKDTYDDDLDNLLAQIGDQYADLFLAAKNLSDAILLSDILRVNTEITKAPLSASMIKRYDEHHQDLTLLKALVRQQLPEKYKEIFFDQSKNGYAGYIDGGASQEEFYKFIKPILEKMDGTEELLVKLNREDLLRKQRTFDNGSIPHQIHLGELHAILRRQEDFYPFLKDNREKIEKILTFRIPYYVGPLARGNSRFAWMTRKSEETITPWNFEEVVDKGASAQSFIERMTNFDKNLPNEKVLPKHSLLYEYFTVYNELTKVKYVTEGMRKPAFLSGEQKKAIVDLLFKTNRKVTVKQLKEDYFKKIECFDSVEISGVEDRFNASLGTYHDLLKIIKDKDFLDNEENEDILEDIVLTLTLFEDREMIEERLKTYAHLFDDKVMKQLKRRRYTGWGRLSRKLINGIRDKQSGKTILDFLKSDGFANRNFMQLIHDDSLTFKEDIQKAQVSGQGDSLHEHIANLAGSPAIKKGILQTVKVVDELVKVMGRHKPENIVIEMARENQTTQKGQKNSRERMKRIEEGIKELGSQILKEHPVENTQLQNEKLYLYYLQNGRDMYVDQELDINRLSDYDVDHIVPQSFLKDDSIDNKVLTRSDKNRGKSDNVPSEEVVKKMKNYWRQLLNAKLITQRKFDNLTKAERGGLSELDKAGFIKRQLVETRQITKHVAQILDSRMNTKYDENDKLIREVKVITLKSKLVSDFRKDFQFYKVREINNYHHAHDAYLNAVVGTALIKKYPKLESEFVYGDYKVYDVRKMIAKSEQEIGKATAKYFFYSNIMNFFKTEITLANGEIRKRPLIETNGETGEIVWDKGRDFATVRKVLSMPQVNIVKKTEVQTGGFSKESILPKRNSDKLIARKKDWDPKKYGGFDSPTVAYSVLVVAKVEKGKSKKLKSVKELLGITIMERSSFEKNPIDFLEAKGYKEVKKDLIIKLPKYSLFELENGRKRMLASAGELQKGNELALPSKYVNFLYLASHYEKLKGSPEDNEQKQLFVEQHKHYLDEIIEQISEFSKRVILADANLDKVLSAYNKHRDKPIREQAENIIHLFTLTNLGAPAAFKYFDTTIDRKRYTSTKEVLDATLIHQSITGLYETRIDLSQLGGDSGGSKRTADGSEFEPKKKRKVGSGATNFSLLKQAGDVEENPGPMVSKGEELFTGVVPILVELDGDVNGHKFSVSGEGEGDATYGKLTLKFICTTGKLPVPWPTLVTTLTYGVQCFSRYPDHMKQHDFFKSAMPEGYVQERTIFFKDDGNYKTRAEVKFEGDTLVNRIELKGIDFKEDGNILGHKLEYNYNSHNVYIMADKQKNGIKVNFKIRHNIEDGSVQLADHYQQNTPIGDGPVLLPDNHYLSTQSALSKDPNEKRDHMVLLEFVTAAGITLGMDELYKSGGSPKKKRKV

SEQ ID NO: 197 - protein, 2261 aa, Artificial Sequence
  Description of Artificial Sequence: Synthetic polypeptide
MKRTADGSEFESPKKKRKVSEVEFSHEYWMRHALTLAKRAWDEREVPVGAVLVHNNRVIGEGWNRPIGRHDPTAHAEIMALRQGGLVMQNYRLIDATLYVTLEPCVMCAGAMIHSRIGRVVFGARDAKTGAAGSLMDVLHHPGMNHRVEITEGILADECAALLSDFFRMRRQEIKAQKKAQSSTDSGGSSGGSSGSETPGTSESATPESSGGSSGGSSEVEFSHEYWMRHALTLAKRARDEREVPVGAVLVLNNRVIGEGWNRAIGLHDPTAHAEIMALRQGGLVMQNYRLIDATLYVTFEPCVMCAGAMIHSRIGRVVFGVRNAKTGAAGSLMDVLHYPGMNHRVEITEGILADECAALLCYFFRMPRQVFNAQKKAQSSTDSGGSSGGSSGSETPGTSESATPESSGGSSGGSDKKYSIGLAIGTNSVGWAVITDEYKVPSKKFKVLGNTDRHSIKKNLIGALLFDSGETAEATRLKRTARRRYTRRKNRICYLQEIFSNEMAKVDDSFFHRLEESFLVEEDKKHERHPIFGNIVDEVAYHEKYPTIYHLRKKLVDSTDKADLRLIYLALAHMIKFRGHFLIEGDLNPDNSDVDKLFIQLVQTYNQLFEENPINASGVDAKAILSARLSKSRRLENLIAQLPGEKKNGLFGNLIALSLGLTPNFKSNFDLAEDAKLQLSKDTYDDDLDNLLAQIGDQYADLFLAAKNLSDAILLSDILRVNTEITKAPLSASMIKRYDEHHQDLTLLKALVRQQLPEKYKEIFFDQSKNGYAGYIDGGASQEEFYKFIKPILEKMDGTEELLVKLNREDLLRKQRTFDNGSIPHQIHLGELHAILRRQEDFYPFLKDNREKIEKILTFRIPYYVGPLARGNSRFAWMTRKSEETITPWNFEEVVDKGASAQSFIERMTNFDKNLPNEKVLPKHSLLYEYFTVYNELTKVKYVTEGMRKPAFLSGEQKKAIVDLLFKTNRKVTVKQLKEDYFKKIECFDSVEISGVEDRFNASLGTYHDLLKIIKDKDFLDNEENEDILEDIVLTLTLFEDREMIEERLKTYAHLFDDKVMKQLKRRRYTGWGRLSRKLINGIRDKQSGKTILDFLKSDGFANRNFMQLIHDDSLTFKEDIQKAQVSGQGDSLHEHIANLAGSPAIKKGILQTVKVVDELVKVMGRHKPENIVIEMARENQTTQKGQKNSRERMKRIEEGIKELGSQILKEHPVENTQLQNEKLYLYYLQNGRDMYVDQELDINRLSDYDVDHIVPQSFLKDDSIDNKVLTRSDKNRGKSDNVPSEEVVKKMKNYWRQLLNAKLITQRKFDNLTKAERGGLSELDKAGFIKRQLVETRQITKHVAQILDSRMNTKYDENDKLIREVKVITLKSKLVSDFRKDFQFYKVREINNYHHAHDAYLNAVVGTALIKKYPKLESEFVYGDYKVYDVRKMIAKSEQEIGKATAKYFFYSNIMNFFKTEITLANGEIRKRPLIETNGETGEIVWDKGRDFATVRKVLSMPQVNIVKKTEVQTGGFSKESILPKRNSDKLIARKKDWDPKKYGGFDSPTVAYSVLVVAKVEKGKSKKLKSVKELLGITIMERSSFEKNPIDFLEAKGYKEVKKDLIIKLPKYSLFELENGRKRMLASAGELQKGNELALPSKYVNFLYLASHYEKLKGSPEDNEQKQLFVEQHKHYLDEIIEQISEFSKRVILADANLDKVLSAYNKHRDKPIREQAENIIHLFTLTNLGAPAAFKYFDTTIDRKRYTSTKEVLDATLIHQSITGLYETRIDLSQLGGDSGGSGGSGGSTNLSDIIEKETGKQLVIQESILMLPEEVEEVIGNKPESDILVHTAYDESTDENVMLLTSDAPEYKPWALVIQDSNGENKIKMLSGGSGGSGGSTNLSDIIEKETGKQLVIQESILMLPEEVEEVIGNKPESDILVHTAYDESTDENVMLLTSDAPEYKPWALVIQDSNGENKIKMLSGGSKRTADGSEFEPKKKRKVGSGATNFSLLKQAGDVEENPGPMVSKGEELFTGVVPILVELDGDVNGHKFSVSGEGEGDATYGKLTLKFICTTGKLPVPWPTLVTTLTYGVQCFSRYPDHMKQHDFFKSAMPEGYVQERTIFFKDDGNYKTRAEVKFEGDTLVNRIELKGIDFKEDGNILGHKLEYNYNSHNVYIMADKQKNGIKVNFKIRHNIEDGSVQLADHYQQNTPIGDGPVLLPDNHYLSTQSALSKDPNEKRDHMVLLEFVTAAGITLGMDELYKSGGSPKKKRKV

SEQ ID NO: 198 - protein, 2063 aa, Artificial Sequence
  Description of Artificial Sequence: Synthetic polypeptide
MKRTADGSEFESPKKKRKVSEVEFSHEYWMRHALTLAKRARDEREVPVGAVLVLNNRVIGEGWNRAIGLHDPTAHAEIMALRQGGLVMQNYRLIDATLYGTFEPCVMCAGAMIHSRIGRVVFGVRNAKTGAAGSLMDVLHYPGMNHRVEITEGILADECAALLCYFFRMPRQVFNAQKKAQSSTDSGGSSGGSSGSETPGTSESATPESSGGSSGGSDKKYSIGLAIGTNSVGWAVITDEYKVPSKKFKVLGNTDRHSIKKNLIGALLFDSGETAEATRLKRTARRRYTRRKNRICYLQEIFSNEMAKVDDSFFHRLEESFLVEEDKKHERHPIFGNIVDEVAYHEKYPTIYHLRKKLVDSTDKADLRLIYLALAHMIKFRGHFLIEGDLNPDNSDVDKLFIQLVQTYNQLFEENPINASGVDAKAILSARLSKSRRLENLIAQLPGEKKNGLFGNLIALSLGLTPNFKSNFDLAEDAKLQLSKDTYDDDLDNLLAQIGDQYADLFLAAKNLSDAILLSDILRVNTEITKAPLSASMIKRYDEHHQDLTLLKALVRQQLPEKYKEIFFDQSKNGYAGYIDGGASQEEFYKFIKPILEKMDGTEELLVKLNREDLLRKQRTFDNGSIPHQIHLGELHAILRRQEDFYPFLKDNREKIEKILTFRIPYYVGPLARGNSRFAWMTRKSEETITPWNFEEVVDKGASAQSFIERMTNFDKNLPNEKVLPKHSLLYEYFTVYNELTKVKYVTEGMRKPAFLSGEQKKAIVDLLFKTNRKVTVKQLKEDYFKKIECFDSVEISGVEDRFNASLGTYHDLLKIIKDKDFLDNEENEDILEDIVLTLTLFEDREMIEERLKTYAHLFDDKVMKQLKRRRYTGWGRLSRKLINGIRDKQSGKTILDFLKSDGFANRNFMQLIHDDSLTFKEDIQKAQVSGQGDSLHEHIANLAGSPAIKKGILQTVKVVDELVKVMGRHKPENIVIEMARENQTTQKGQKNSRERMKRIEEGIKELGSQILKEHPVENTQLQNEKLYLYYLQNGRDMYVDQELDINRLSDYDVDHIVPQSFLKDDSIDNKVLTRSDKNRGKSDNVPSEEVVKKMKNYWRQLLNAKLITQRKFDNLTKAERGGLSELDKAGFIKRQLVETRQITKHVAQILDSRMNTKYDENDKLIREVKVITLKSKLVSDFRKDFQFYKVREINNYHHAHDAYLNAVVGTALIKKYPKLESEFVYGDYKVYDVRKMIAKSEQEIGKATAKYFFYSNIMNFFKTEITLANGEIRKRPLIETNGETGEIVWDKGRDFATVRKVLSMPQVNIVKKTEVQTGGFSKESILPKRNSDKLIARKKDWDPKKYGGFDSPTVAYSVLVVAKVEKGKSKKLKSVKELLGITIMERSSFEKNPIDFLEAKGYKEVKKDLIIKLPKYSLFELENGRKRMLASAGELQKGNELALPSKYVNFLYLASHYEKLKGSPEDNEQKQLFVEQHKHYLDEIIEQISEFSKRVILADANLDKVLSAYNKHRDKPIREQAENIIHLFTLTNLGAPAAFKYFDTTIDRKRYTSTKEVLDATLIHQSITGLYETRIDLSQLGGDSGGSGGSGGSTNLSDIIEKETGKQLVIQESILMLPEEVEEVIGNKPESDILVHTAYDESTDENVMLLTSDAPEYKPWALVIQDSNGENKIKMLSGGSGGSGGSTNLSDIIEKETGKQLVIQESILMLPEEVEEVIGNKPESDILVHTAYDESTDENVMLLTSDAPEYKPWALVIQDSNGENKIKMLSGGSKRTADGSEFEPKKKRKVGSGATNFSLLKQAGDVEENPGPMVSKGEELFTGVVPILVELDGDVNGHKFSVSGEGEGDATYGKLTLKFICTTGKLPVPWPTLVTTLTYGVQCFSRYPDHMKQHDFFKSAMPEGYVQERTIFFKDDGNYKTRAEVKFEGDTLVNRIELKGIDFKEDGNILGHKLEYNYNSHNVYIMADKQKNGIKVNFKIRHNIEDGSVQLADHYQQNTPIGDGPVLLPDNHYLSTQSALSKDPNEKRDHMVLLEFVTAAGITLGMDELYKSGGSPKKKRKV

SEQ ID NO: 199 - protein, 1897 aa, Artificial Sequence
  Description of Artificial Sequence: Synthetic polypeptide
MKRTADGSEFESPKKKRKVSGGSSGGSSGSETPGTSESATPESSGGSSGGSDKKYSIGLAIGTNSVGWAVITDEYKVPSKKFKVLGNTDRHSIKKNLIGALLFDSGETAEATRLKRTARRRYTRRKNRICYLQEIFSNEMAKVDDSFFHRLEESFLVEEDKKHERHPIFGNIVDEVAYHEKYPTIYHLRKKLVDSTDKADLRLIYLALAHMIKFRGHFLIEGDLNPDNSDVDKLFIQLVQTYNQLFEENPINASGVDAKAILSARLSKSRRLENLIAQLPGEKKNGLFGNLIALSLGLTPNFKSNFDLAEDAKLQLSKDTYDDDLDNLLAQIGDQYADLFLAAKNLSDAILLSDILRVNTEITKAPLSASMIKRYDEHHQDLTLLKALVRQQLPEKYKEIFFDQSKNGYAGYIDGGASQEEFYKFIKPILEKMDGTEELLVKLNREDLLRKQRTFDNGSIPHQIHLGELHAILRRQEDFYPFLKDNREKIEKILTFRIPYYVGPLARGNSRFAWMTRKSEETITPWNFEEVVDKGASAQSFIERMTNFDKNLPNEKVLPKHSLLYEYFTVYNELTKVKYVTEGMRKPAFLSGEQKKAIVDLLFKTNRKVTVKQLKEDYFKKIECFDSVEISGVEDRFNASLGTYHDLLKIIKDKDFLDNEENEDILEDIVLTLTLFEDREMIEERLKTYAHLFDDKVMKQLKRRRYTGWGRLSRKLINGIRDKQSGKTILDFLKSDGFANRNFMQLIHDDSLTFKEDIQKAQVSGQGDSLHEHIANLAGSPAIKKGILQTVKVVDELVKVMGRHKPENIVIEMARENQTTQKGQKNSRERMKRIEEGIKELGSQILKEHPVENTQLQNEKLYLYYLQNGRDMYVDQELDINRLSDYDVDHIVPQSFLKDDSIDNKVLTRSDKNRGKSDNVPSEEVVKKMKNYWRQLLNAKLITQRKFDNLTKAERGGLSELDKAGFIKRQLVETRQITKHVAQILDSRMNTKYDENDKLIREVKVITLKSKLVSDFRKDFQFYKVREINNYHHAHDAYLNAVVGTALIKKYPKLESEFVYGDYKVYDVRKMIAKSEQEIGKATAKYFFYSNIMNFFKTEITLANGEIRKRPLIETNGETGEIVWDKGRDFATVRKVLSMPQVNIVKKTEVQTGGFSKESILPKRNSDKLIARKKDWDPKKYGGFDSPTVAYSVLVVAKVEKGKSKKLKSVKELLGITIMERSSFEKNPIDFLEAKGYKEVKKDLIIKLPKYSLFELENGRKRMLASAGELQKGNELALPSKYVNFLYLASHYEKLKGSPEDNEQKQLFVEQHKHYLDEIIEQISEFSKRVILADANLDKVLSAYNKHRDKPIREQAENIIHLFTLTNLGAPAAFKYFDTTIDRKRYTSTKEVLDATLIHQSITGLYETRIDLSQLGGDSGGSGGSGGSTNLSDIIEKETGKQLVIQESILMLPEEVEEVIGNKPESDILVHTAYDESTDENVMLLTSDAPEYKPWALVIQDSNGENKIKMLSGGSGGSGGSTNLSDIIEKETGKQLVIQESILMLPEEVEEVIGNKPESDILVHTAYDESTDENVMLLTSDAPEYKPWALVIQDSNGENKIKMLSGGSKRTADGSEFEPKKKRKVGSGATNFSLLKQAGDVEENPGPMVSKGEELFTGVVPILVELDGDVNGHKFSVSGEGEGDATYGKLTLKFICTTGKLPVPWPTLVTTLTYGVQCFSRYPDHMKQHDFFKSAMPEGYVQERTIFFKDDGNYKTRAEVKFEGDTLVNRIELKGIDFKEDGNILGHKLEYNYNSHNVYIMADKQKNGIKVNFKIRHNIEDGSVQLADHYQQNTPIGDGPVLLPDNHYLSTQSALSKDPNEKRDHMVLLEFVTAAGITLGMDELYKSGGSPKKKRKV

SEQ ID NO: 200 - protein, 1251 aa, Homo sapiens
MRRGGWRKRAENDGWETWGGYMAAKVQKLEEQFRSDAAMQKDGTSSTIFSGVAIYVNGYTDPSAEELRKLMMLHGGQYHVYYSRSKTTHIIATNLPNAKIKELKGEKVIRPEWIVESIKAGRLLSYIPYQLYTKQSSVQKGLSFNPVCRPEDPLPGPSNIAKQLNNRVNHIVKKIETENEVKVNGMNSWNEEDENNDFSFVDLEQTSPGRKQNGIPHPRGSTAIFNGHTPSSNGALKTQDCLVPMVNSVASRLSPAFSQEEDKAEKSSTDFRDCTLQQLQQSTRNTDALRNPHRTNSFSLSPLHSNTKINGAHHSTVQGPSSTKSTSSVSTFSKAAPSVPSKPSDCNFISNFYSHSRLHHISMWKCELTEFVNTLQRQSNGIFPGREKLKKMKTGRSALVVTDTGDMSVLNSPRHQSCIMHVDMDCFFVSVGIRNRPDLKGKPVAVTSNRGTGRAPLRPGANPQLEWQYYQNKILKGKAADIPDSSLWENPDSAQANGIDSVLSRAEIASCSYEARQLGIKNGMFFGHAKQLCPNLQAVPYDFHAYKEVAQTLYETLASYTHNIEAVSCDEALVDITEILAETKLTPDEFANAVRMEIKDQTKCAASVGIGSNILLARMATRKAKPDGQYHLKPEEVDDFIRGQLVTNLPGVGHSMESKLASLGIKTCGDLQYMTMAKLQKEFGPKTGQMLYRFCRGLDDRPVRTEKERKSVSAEINYGIRFTQPKEAEAFLLSLSEEIQRRLEATGMKGKRLTLKIMVRKPGAPVETAKFGGHGICDNIARTVTLDQATDNAKIIGKAMLNMFHTMKLNISDMRGVGIHVNQLVPTNLNPSTCPSRPSVQSSHFPSGSYSVRDVFQVQKAKKSTEEEHKEVFRAAVDLEISSASRTCTFLPPFPAHLPTSPDTNKAESSGKWNGLHTPVSVQSRLNLSIEVPSPSQLDQSVLEALPPDLREQVEQVCAVQQAESHGDKKKEPVNGCNTGILPQPVGTVLLQIPEPQESNSDAGINLIALPAFSQVDPEVFAALPAELQRELKAAYDQRQRQGENSTHQQSASASVPKNPLLHLKAAVKEKKRNKKKKTIGSPKRIQSPLNNKLLNSPAKTLPGACGSPQKLIDGFLKHEGPPAEKPLEELSASTSGVPGLSSLQSDPAGCVRPPAPNLAGAVEFNDVKTLLREWITTISDPMEEDILQVVKYCTDLIEEKDLEKLDLVIKYMKRLMQQSVESVWNMAFDFILDNVQVVLQQTYGSTLKVT

SEQ ID NO: 201 - protein, 3185 aa, Artificial Sequence
  Description of Artificial Sequence: Synthetic polypeptide
MKRTADGSEFESPKKKRKVSSETGPVAVDPTLRRRIEPHEFEVFFDPRELRKETCLLYEINWGGRHSIWRHTSQNTNKHVEVNFIEKFTTERYFCPNTRCSITWFLSWSPCGECSRAITEFLSRYPHVTLFIYIARLYHHADPRNRQGLRDLISSGVTIQIMTEQESGYCWRNFVNYSPSNEAHWPRYPHLWVRLYVLELYCIILGLPPCLNILRRKQPQLTFFTIALQSCHYQRLPPHILWATGLKSGGSSGGSSGSETPGTSESATPESSGGSSGGSDKKYSIGLAIGTNSVGWAVITDEYKVPSKKFKVLGNTDRHSIKKNLIGALLFDSGETAEATRLKRTARRRYTRRKNRICYLQEIFSNEMAKVDDSFFHRLEESFLVEEDKKHERHPIFGNIVDEVAYHEKYPTIYHLRKKLVDSTDKADLRLIYLALAHMIKFRGHFLIEGDLNPDNSDVDKLFIQLVQTYNQLFEENPINASGVDAKAILSARLSKSRRLENLIAQLPGEKKNGLFGNLIALSLGLTPNFKSNFDLAEDAKLQLSKDTYDDDLDNLLAQIGDQYADLFLAAKNLSDAILLSDILRVNTEITKAPLSASMIKRYDEHHQDLTLLKALVRQQLPEKYKEIFFDQSKNGYAGYIDGGASQEEFYKFIKPILEKMDGTEELLVKLNREDLLRKQRTFDNGSIPHQIHLGELHAILRRQEDFYPFLKDNREKIEKILTFRIPYYVGPLARGNSRFAWMTRKSEETITPWNFEEVVDKGASAQSFIERMTNFDKNLPNEKVLPKHSLLYEYFTVYNELTKVKYVTEGMRKPAFLSGEQKKAIVDLLFKTNRKVTVKQLKEDYFKKIECFDSVEISGVEDRFNASLGTYHDLLKIIKDKDFLDNEENEDILEDIVLTLTLFEDREMIEERLKTYAHLFDDKVMKQLKRRRYTGWGRLSRKLINGIRDKQSGKTILDFLKSDGFANRNFMQLIHDDSLTFKEDIQKAQVSGQGDSLHEHIANLAGSPAIKKGILQTVKVVDELVKVMGRHKPENIVIEMARENQTTQKGQKNSRERMKRIEEGIKELGSQILKEHPVENTQLQNEKLYLYYLQNGRDMYVDQELDINRLSDYDVDHIVPQSFLKDDSIDNKVLTRSDKNRGKSDNVPSEEVVKKMKNYWRQLLNAKLITQRKFDNLTKAERGGLSELDKAGFIKRQLVETRQITKHVAQILDSRMNTKYDENDKLIREVKVITLKSKLVSDFRKDFQFYKVREINNYHHAHDAYLNAVVGTALIKKYPKLESEFVYGDYKVYDVRKMIAKSEQEIGKATAKYFFYSNIMNFFKTEITLANGEIRKRPLIETNGETGEIVWDKGRDFATVRKVLSMPQVNIVKKTEVQTGGFSKESILPKRNSDKLIARKKDWDPKKYGGFDSPTVAYSVLVVAKVEKGKSKKLKSVKELLGITIMERSSFEKNPIDFLEAKGYKEVKKDLIIKLPKYSLFELENGRKRMLASAGELQKGNELALPSKYVNFLYLASHYEKLKGSPEDNEQKQLFVEQHKHYLDEIIEQISEFSKRVILADANLDKVLSAYNKHRDKPIREQAENIIHLFTLTNLGAPAAFKYFDTTIDRKRYTSTKEVLDATLIHQSITGLYETRIDLSQLGGDSGGSRRGGWRKRAENDGWETWGGYMAAKVQKLEEQFRSDAAMQKDGTSSTIFSGVAIYVNGYTDPSAEELRKLMMLHGGQYHVYYSRSKTTHIIATNLPNAKIKELKGEKVIRPEWIVESIKAGRLLSYIPYQLYTKQSSVQKGLSFNPVCRPEDPLPGPSNIAKQLNNRVNHIVKKIETENEVKVNGMNSWNEEDENNDFSFVDLEQTSPGRKQNGIPHPRGSTAIFNGHTPSSNGALKTQDCLVPMVNSVASRLSPAFSQEEDKAEKSSTDFRDCTLQQLQQSTRNTDALRNPHRTNSFSLSPLHSNTKINGAHHSTVQGPSSTKSTSSVSTFSKAAPSVPSKPSDCNFISNFYSHSRLHHISMWKCELTEFVNTLQRQSNGIFPGREKLKKMKTGRSALVVTDTGDMSVLNSPRHQSCIMHVDMDCFFVSVGIRNRPDLKGKPVAVTSNRGTGRAPLRPGANPQLEWQYYQNKILKGKAADIPDSSLWENPDSAQANGIDSVLSRAEIASCSYEARQLGIKNGMFFGHAKQLCPNLQAVPYDFHAYKEVAQTLYETLASYTHNIEAVSCDEALVDITEILAETKLTPDEFANAVRMEIKDQTKCAASVGIGSNILLARMATRKAKPDGQYHLKPEEVDDFIRGQLVTNLPGVGHSMESKLASLGIKTCGDLQYMTMAKLQKEFGPKTGQMLYRFCRGLDDRPVRTEKERKSVSAEINYGIRFTQPKEAEAFLLSLSEEIQRRLEATGMKGKRLTLKIMVRKPGAPVETAKFGGHGICDNIARTVTLDQATDNAKIIGKAMLNMFHTMKLNISDMRGVGIHVNQLVPTNLNPSTCPSRPSVQSSHFPSGSYSVRDVFQVQKAKKSTEEEHKEVFRAAVDLEISSASRTCTFLPPFPAHLPTSPDTNKAESSGKWNGLHTPVSVQSRLNLSIEVPSPSQLDQSVLEALPPDLREQVEQVCAVQQAESHGDKKKEPVNGCNTGILPQPVGTVLLQIPEPQESNSDAGINLIALPAFSQVDPEVFAALPAELQRELKAAYDQRQRQGENSTHQQSASASVPKNPLLHLKAAVKEKKRNKKKKTIGSPKRIQSPLNNKLLNSPAKTLPGACGSPQKLIDGFLKHEGPPAEKPLEELSASTSGVPGLSSLQSDPAGCVRPPAPNLAGAVEFNDVKTLLREWITTISDPMEEDILQVVKYCTDLIEEKDLEKLDLVIKYMKRLMQQSVESVWNMAFDFILDNVQVVLQQTYGSTLKVTSGGSKRTADGSEFEPKKKRKVGGGGSGATNFSLLKQAGDVEENPGPMVSKGEELFTGVVPILVELDGDVNGHKFSVSGEGEGDATYGKLTLKFICTTGKLPVPWPTLVTTLTYGVQCFSRYPDHMKQHDFFKSAMPEGYVQERTIFFKDDGNYKTRAEVKFEGDTLVNRIELKGIDFKEDGNILGHKLEYNYNSHNVYIMADKQKNGIKVNFKIRHNIEDGSVQLADHYQQNTPIGDGPVLLPDNHYLSTQSALSKDPNEKRDHMVLLEFVTAAGITLGMDELYK

SEQ ID NO: 202 - protein, 3423 aa, Artificial Sequence
  Description of Artificial Sequence: Synthetic polypeptide
MKRTADGSEFESPKKKRKVSSETGPVAVDPTLRRRIEPHEFEVFFDPRELRKETCLLYEINWGGRHSIWRHTSQNTNKHVEVNFIEKFTTERYFCPNTRCSITWFLSWSPCGECSRAITEFLSRYPHVTLFIYIARLYHHADPRNRQGLRDLISSGVTIQIMTEQESGYCWRNFVNYSPSNEAHWPRYPHLWVRLYVLELYCIILGLPPCLNILRRKQPQLTFFTIALQSCHYQRLPPHILWATGLKSGGSSGGSSGSETPGTSESATPESSGGSSGGSDKKYSIGLAIGTNSVGWAVITDEYKVPSKKFKVLGNTDRHSIKKNLIGALLFDSGETAEATRLKRTARRRYTRRKNRICYLQEIFSNEMAKVDDSFFHRLEESFLVEEDKKHERHPIFGNIVDEVAYHEKYPTIYHLRKKLVDSTDKADLRLIYLALAHMIKFRGHFLIEGDLNPDNSDVDKLFIQLVQTYNQLFEENPINASGVDAKAILSARLSKSRRLENLIAQLPGEKKNGLFGNLIALSLGLTPNFKSNFDLAEDAKLQLSKDTYDDDLDNLLAQIGDQYADLFLAAKNLSDAILLSDILRVNTEITKAPLSASMIKRYDEHHQDLTLLKALVRQQLPEKYKEIFFDQSKNGYAGYIDGGASQEEFYKFIKPILEKMDGTEELLVKLNREDLLRKQRTFDNGSIPHQIHLGELHAILRRQEDFYPFLKDNREKIEKILTFRIPYYVGPLARGNSRFAWMTRKSEETITPWNFEEVVDKGASAQSFIERMTNFDKNLPNEKVLPKHSLLYEYFTVYNELTKVKYVTEGMRKPAFLSGEQKKAIVDLLFKTNRKVTVKQLKEDYFKKIECFDSVEISGVEDRFNASLGTYHDLLKIIKDKDFLDNEENEDILEDIVLTLTLFEDREMIEERLKTYAHLFDDKVMKQLKRRRYTGWGRLSRKLINGIRDKQSGKTILDFLKSDGFANRNFMQLIHDDSLTFKEDIQKAQVSGQGDSLHEHIANLAGSPAIKKGILQTVKVVDELVKVMGRHKPENIVIEMARENQTTQKGQKNSRERMKRIEEGIKELGSQILKEHPVENTQLQNEKLYLYYLQNGRDMYVDQELDINRLSDYDVDHIVPQSFLKDDSIDNKVLTRSDKNRGKSDNVPSEEVVKKMKNYWRQLLNAKLITQRKFDNLTKAERGGLSELDKAGFIKRQLVETRQITKHVAQILDSRMNTKYDENDKLIREVKVITLKSKLVSDFRKDFQFYKVREINNYHHAHDAYLNAVVGTALIKKYPKLESEFVYGDYKVYDVRKMIAKSEQEIGKATAKYFFYSNIMNFFKTEITLANGEIRKRPLIETNGETGEIVWDKGRDFATVRKVLSMPQVNIVKKTEVQTGGFSKESILPKRNSDKLIARKKDWDPKKYGGFDSPTVAYSVLVVAKVEKGKSKKLKSVKELLGITIMERSSFEKNPIDFLEAKGYKEVKKDLIIKLPKYSLFELENGRKRMLASAGELQKGNELALPSKYVNFLYLASHYEKLKGSPEDNEQKQLFVEQHKHYLDEIIEQISEFSKRVILADANLDKVLSAYNKHRDKPIREQAENIIHLFTLTNLGAPAAFKYFDTTIDRKRYTSTKEVLDATLIHQSITGLYETRIDLSQLGGDSGGSRRGGWRKRAENDGWETWGGYMAAKVQKLEEQFRSDAAMQKDGTSSTIFSGVAIYVNGYTDPSAEELRKLMMLHGGQYHVYYSRSKTTHIIATNLPNAKIKELKGEKVIRPEWIVESIKAGRLLSYIPYQLYTKQSSVQKGLSFNPVCRPEDPLPGPSNIAKQLNNRVNHIVKKIETENEVKVNGMNSWNEEDENNDFSFVDLEQTSPGRKQNGIPHPRGSTAIFNGHTPSSNGALKTQDCLVPMVNSVASRLSPAFSQEEDKAEKSSTDFRDCTLQQLQQSTRNTDALRNPHRTNSFSLSPLHSNTKINGAHHSTVQGPSSTKSTSSVSTFSKAAPSVPSKPSDCNFISNFYSHSRLHHISMWKCELTEFVNTLQRQSNGIFPGREKLKKMKTGRSALVVTDTGDMSVLNSPRHQSCIMHVDMDCFFVSVGIRNRPDLKGKPVAVTSNRGTGRAPLRPGANPQLEWQYYQNKILKGKAADIPDSSLWENPDSAQANGIDSVLSRAEIASCSYEARQLGIKNGMFFGHAKQLCPNLQAVPYDFHAYKEVAQTLYETLASYTHNIEAVSCDEALVDITEILAETKLTPDEFANAVRMEIKDQTKCAASVGIGSNILLARMATRKAKPDGQYHLKPEEVDDFIRGQLVTNLPGVGHSMESKLASLGIKTCGDLQYMTMAKLQKEFGPKTGQMLYRFCRGLDDRPVRTEKERKSVSAEINYGIRFTQPKEAEAFLLSLSEEIQRRLEATGMKGKRLTLKIMVRKPGAPVETAKFGGHGICDNIARTVTLDQATDNAKIIGKAMLNMFHTMKLNISDMRGVGIHVNQLVPTNLNPSTCPSRPSVQSSHFPSGSYSVRDVFQVQKAKKSTEEEHKEVFRAAVDLEISSASRTCTFLPPFPAHLPTSPDTNKAESSGKWNGLHTPVSVQSRLNLSIEVPSPSQLDQSVLEALPPDLREQVEQVCAVQQAESHGDKKKEPVNGCNTGILPQPVGTVLLQIPEPQESNSDAGINLIALPAFSQVDPEVFAALPAELQRELKAAYDQRQRQGENSTHQQSASASVPKNPLLHLKAAVKEKKRNKKKKTIGSPKRIQSPLNNKLLNSPAKTLPGACGSPQKLIDGFLKHEGPPAEKPLEELSASTSGVPGLSSLQSDPAGCVRPPAPNLAGAVEFNDVKTLLREWITTISDPMEEDILQVVKYCTDLIEEKDLEKLDLVIKYMKRLMQQSVESVWNMAFDFILDNVQVVLQQTYGSTLKVTSGGSGGSGGSANELTWHDVLAEEKQQPYFLNTLQTVASERQSGVTIYPPQKDVFNAFRFTELGDVKVVILGQDPYHGPGQAHGLAFSVRPGIAIPPSLLNMYKELENTIPGFTRPNHGYLESWARQGVLLLNTVLTVRAGQAHSHASLGWETFTDKVISLINQHREGVVFLLWGSHAQKKGAIIDKQRHHVLKAPHPSPLSAHRGFFGCNHFVLANQWLEQRGETPIDWMPVLPAESESGGSKRTADGSEFEPKKKRKVGGGGSGATNFSLLKQAGDVEENPGPMVSKGEELFTGVVPILVELDGDVNGHKFSVSGEGEGDATYGKLTLKFICTTGKLPVPWPTLVTTLTYGVQCFSRYPDHMKQHDFFKSAMPEGYVQERTIFFKDDGNYKTRAEVKFEGDTLVNRIELKGIDFKEDGNILGHKLEYNYNSHNVYIMADKQKNGIKVNFKIRHNIEDGSVQLADHYQQNTPIGDGPVLLPDNHYLSTQSALSKDPNEKRDHMVLLEFVTAAGITLGMDELYK

SEQ ID NO: 203 - protein, 3507 aa, Artificial Sequence
  Description of Artificial Sequence: Synthetic polypeptide
MKRTADGSEFESPKKKRKVSSETGPVAVDPTLRRRIEPHEFEVFFDPRELRKETCLLYEINWGGRHSIWRHTSQNTNKHVEVNFIEKFTTERYFCPNTRCSITWFLSWSPCGECSRAITEFLSRYPHVTLFIYIARLYHHADPRNRQGLRDLISSGVTIQIMTEQESGYCWRNFVNYSPSNEAHWPRYPHLWVRLYVLELYCIILGLPPCLNILRRKQPQLTFFTIALQSCHYQRLPPHILWATGLKSGGSSGGSSGSETPGTSESATPESSGGSSGGSDKKYSIGLAIGTNSVGWAVITDEYKVPSKKFKVLGNTDRHSIKKNLIGALLFDSGETAEATRLKRTARRRYTRRKNRICYLQEIFSNEMAKVDDSFFHRLEESFLVEEDKKHERHPIFGNIVDEVAYHEKYPTIYHLRKKLVDSTDKADLRLIYLALAHMIKFRGHFLIEGDLNPDNSDVDKLFIQLVQTYNQLFEENPINASGVDAKAILSARLSKSRRLENLIAQLPGEKKNGLFGNLIALSLGLTPNFKSNFDLAEDAKLQLSKDTYDDDLDNLLAQIGDQYADLFLAAKNLSDAILLSDILRVNTEITKAPLSASMIKRYDEHHQDLTLLKALVRQQLPEKYKEIFFDQSKNGYAGYIDGGASQEEFYKFIKPILEKMDGTEELLVKLNREDLLRKQRTFDNGSIPHQIHLGELHAILRRQEDFYPFLKDNREKIEKILTFRIPYYVGPLARGNSRFAWMTRKSEETITPWNFEEVVDKGASAQSFIERMTNFDKNLPNEKVLPKHSLLYEYFTVYNELTKVKYVTEGMRKPAFLSGEQKKAIVDLLFKTNRKVTVKQLKEDYFKKIECFDSVEISGVEDRFNASLGTYHDLLKIIKDKDFLDNEENEDILEDIVLTLTLFEDREMIEERLKTYAHLFDDKVMKQLKRRRYTGWGRLSRKLINGIRDKQSGKTILDFLKSDGFANRNFMQLIHDDSLTFKEDIQKAQVSGQGDSLHEHIANLAGSPAIKKGILQTVKVVDELVKVMGRHKPENIVIEMARENQTTQKGQKNSRERMKRIEEGIKELGSQILKEHPVENTQLQNEKLYLYYLQNGRDMYVDQELDINRLSDYDVDHIVPQSFLKDDSIDNKVLTRSDKNRGKSDNVPSEEVVKKMKNYWRQLLNAKLITQRKFDNLTKAERGGLSELDKAGFIKRQLVETRQITKHVAQILDSRMNTKYDENDKLIREVKVITLKSKLVSDFRKDFQFYKVREINNYHHAHDAYLNAVVGTALIKKYPKLESEFVYGDYKVYDVRKMIAKSEQEIGKATAKYFFYSNIMNFFKTEITLANGEIRKRPLIETNGETGEIVWDKGRDFATVRKVLSMPQVNIVKKTEVQTGGFSKESILPKRNSDKLIARKKDWDPKKYGGFDSPTVAYSVLVVAKVEKGKSKKLKSVKELLGITIMERSSFEKNPIDFLEAKGYKEVKKDLIIKLPKYSLFELENGRKRMLASAGELQKGNELALPSKYVNFLYLASHYEKLKGSPEDNEQKQLFVEQHKHYLDEIIEQISEFSKRVILADANLDKVLSAYNKHRDKPIREQAENIIHLFTLTNLGAPAAFKYFDTTIDRKRYTSTKEVLDATLIHQSITGLYETRIDLSQLGGDSGGSRRGGWRKRAENDGWETWGGYMAAKVQKLEEQFRSDAAMQKDGTSSTIFSGVAIYVNGYTDPSAEELRKLMMLHGGQYHVYYSRSKTTHIIATNLPNAKIKELKGEKVIRPEWIVESIKAGRLLSYIPYQLYTKQSSVQKGLSFNPVCRPEDPLPGPSNIAKQLNNRVNHIVKKIETENEVKVNGMNSWNEEDENNDFSFVDLEQTSPGRKQNGIPHPRGSTAIFNGHTPSSNGALKTQDCLVPMVNSVASRLSPAFSQEEDKAEKSSTDFRDCTLQQLQQSTRNTDALRNPHRTNSFSLSPLHSNTKINGAHHSTVQGPSSTKSTSSVSTFSKAAPSVPSKPSDCNFISNFYSHSRLHHISMWKCELTEFVNTLQRQSNGIFPGREKLKKMKTGRSALVVTDTGDMSVLNSPRHQSCIMHVDMDCFFVSVGIRNRPDLKGKPVAVTSNRGTGRAPLRPGANPQLEWQYYQNKILKGKAADIPDSSLWENPDSAQANGIDSVLSRAEIASCSYEARQLGIKNGMFFGHAKQLCPNLQAVPYDFHAYKEVAQTLYETLASYTHNIEAVSCDEALVDITEILAETKLTPDEFANAVRMEIKDQTKCAASVGIGSNILLARMATRKAKPDGQYHLKPEEVDDFIRGQLVTNLPGVGHSMESKLASLGIKTCGDLQYMTMAKLQKEFGPKTGQMLYRFCRGLDDRPVRTEKERKSVSAEINYGIRFTQPKEAEAFLLSLSEEIQRRLEATGMKGKRLTLKIMVRKPGAPVETAKFGGHGICDNIARTVTLDQATDNAKIIGKAMLNMFHTMKLNISDMRGVGIHVNQLVPTNLNPSTCPSRPSVQSSHFPSGSYSVRDVFQVQKAKKSTEEEHKEVFRAAVDLEISSASRTCTFLPPFPAHLPTSPDTNKAESSGKWNGLHTPVSVQSRLNLSIEVPSPSQLDQSVLEALPPDLREQVEQVCAVQQAESHGDKKKEPVNGCNTGILPQPVGTVLLQIPEPQESNSDAGINLIALPAFSQVDPEVFAALPAELQRELKAAYDQRQRQGENSTHQQSASASVPKNPLLHLKAAVKEKKRNKKKKTIGSPKRIQSPLNNKLLNSPAKTLPGACGSPQKLIDGFLKHEGPPAEKPLEELSASTSGVPGLSSLQSDPAGCVRPPAPNLAGAVEFNDVKTLLREWITTISDPMEEDILQVVKYCTDLIEEKDLEKLDLVIKYMKRLMQQSVESVWNMAFDFILDNVQVVLQQTYGSTLKVTSGGSGGSGGSIGQKTLYSFFSPSPARKRHAPSPEPAVQGTGVAGVPEESGDAAAIPAKKAPAGQEEPGTPPSSPLSAEQLDRIQRNKAAALLRLAARNVPVGFGESWKKHLSGEFGKPYFIKLMGFVAEERKHYTVYPPPHQVFTWTQMCDIKDVKVVILGQDPYHGPNQAHGLCFSVQRPVPPPPSLENIYKELSTDIEDFVHPGHGDLSGWAKQGVLLLNAVLTVRAHQANSHKERGWEQFTDAVVSWLNQNSNGLVFLLWGSYAQKKGSAIDRKRHHVLQTAHPSPLSVYRGFFGCRHFSKTNELLQKSGKKPIDWKELSGGSKRTADGSEFEPKKKRKVGGGGSGATNFSLLKQAGDVEENPGPMVSKGEELFTGVVPILVELDGDVNGHKFSVSGEGEGDATYGKLTLKFICTTGKLPVPWPTLVTTLTYGVQCFSRYPDHMKQHDFFKSAMPEGYVQERTIFFKDDGNYKTRAEVKFEGDTLVNRIELKGIDFKEDGNILGHKLEYNYNSHNVYIMADKQKNGIKVNFKIRHNIEDGSVQLADHYQQNTPIGDGPVLLPDNHYLSTQSALSKDPNEKRDHMVLLEFVTAAGITLGMDELYK

SEQ ID NO: 204 - protein, 163 aa, Artificial Sequence
  Description of Artificial Sequence: Synthetic polypeptide
MSFERNYDPRELRKETYLLYEIKWGKSGKLWRHWCQNNRTQHAEVYFLENIFNARRFNPSTHCSITWYLSWSPCAECSQKIVDFLKEHPNVNLEIYVARLYYPENERNRQGLRDLVNSGVTIRIMDLPDYNYCWKTFVSDQGGDEDYWPGHFAPWIKQYSLKL

SEQ ID NO: 205 - protein, 229 aa, Artificial Sequence
  Description of Artificial Sequence: Synthetic polypeptide
MSSKTGPVAVDPTLRRRIEPHEFEVFFDPRELRKETCLLYEINWGGRHSIWRHTSQNTNKHVEVNFIEKFTTERYFCPNTRCSITWFLSWSPCGECSRAITEFLSRYPNVTLFIYIARLYHLANPRNRQGLRDLISSGVTIQIMTEQESGYCWHNFVNYSPSNESHWPRYPHLWVRLYVLELYCIILGLPPCLNILRRKQSQLTSFTIALQSCHYQRLPPHILWATGLK

SEQ ID NO: 206 - protein, 1931 aa, Artificial Sequence
  Description of Artificial Sequence: Synthetic polypeptide
MKRTADGSEFESPKKKRKVSSETGPVAVDPTLRRRIEPHEFEVFFDPRELAKETCLLYEINWGGRHSIWRHTSQNTNKHVEVNFIEKFTTERYFCPNTRCSITWFLSWSPCGECSRAITEFLSRYPHVTLFIYIARLYHHADPRNRQGLRDLISSGVTIQIMTEQESGYCWRNFVNYSPSNEAHWPRYPHLWVRLYVLELYCIILGLPPCLNILRRKQPQLTFFTIALQSCHYQRLPPHILWATGLKSGGSSGGSSGSETPGTSESATPESSGGSSGGSDKKYSIGLAIGTNSVGWAVITDEYKVPSKKFKVLGNTDRHSIKKNLIGALLFDSGETAEATRLKRTARRRYTRRKNRICYLQEIFSNEMAKVDDSFFHRLEESFLVEEDKKHERHPIFGNIVDEVAYHEKYPTIYHLRKKLVDSTDKADLRLIYLALAHMIKFRGHFLIEGDLNPDNSDVDKLFIQLVQTYNQLFEENPINASGVDAKAILSARLSKSRRLENLIAQLPGEKKNGLFGNLIALSLGLTPNFKSNFDLAEDAKLQLSKDTYDDDLDNLLAQIGDQYADLFLAAKNLSDAILLSDILRVNTEITKAPLSASMIKRYDEHHQDLTLLKALVRQQLPEKYKEIFFDQSKNGYAGYIDGGASQEEFYKFIKPILEKMDGTEELLVKLNREDLLRKQRTFDNGSIPHQIHLGELHAILRRQEDFYPFLKDNREKIEKILTFRIPYYVGPLARGNSRFAWMTRKSEETITPWNFEEVVDKGASAQSFIERMTNFDKNLPNEKVLPKHSLLYEYFTVYNELTKVKYVTEGMRKPAFLSGEQKKAIVDLLFKTNRKVTVKQLKEDYFKKIECFDSVEISGVEDRFNASLGTYHDLLKIIKDKDFLDNEENEDILEDIVLTLTLFEDREMIEERLKTYAHLFDDKVMKQLKRRRYTGWGRLSRKLINGIRDKQSGKTILDFLKSDGFANRNFMQLIHDDSLTFKEDIQKAQVSGQGDSLHEHIANLAGSPAIKKGILQTVKVVDELVKVMGRHKPENIVIEMARENQTTQKGQKNSRERMKRIEEGIKELGSQILKEHPVENTQLQNEKLYLYYLQNGRDMYVDQELDINRLSDYDVDHIVPQSFLKDDSIDNKVLTRSDKNRGKSDNVPSEEVVKKMKNYWRQLLNAKLITQRKFDNLTKAERGGLSELDKAGFIKRQLVETRQITKHVAQILDSRMNTKYDENDKLIREVKVITLKSKLVSDFRKDFQFYKVREINNYHHAHDAYLNAVVGTALIKKYPKLESEFVYGDYKVYDVRKMIAKSEQEIGKATAKYFFYSNIMNFFKTEITLANGEIRKRPLIETNGETGEIVWDKGRDFATVRKVLSMPQVNIVKKTEVQTGGFSKESILPKRNSDKLIARKKDWDPKKYGGFDSPTVAYSVLVVAKVEKGKSKKLKSVKELLGITIMERSSFEKNPIDFLEAKGYKEVKKDLIIKLPKYSLFELENGRKRMLASAGELQKGNELALPSKYVNFLYLASHYEKLKGSPEDNEQKQLFVEQHKHYLDEIIEQISEFSKRVILADANLDKVLSAYNKHRDKPIREQAENIIHLFTLTNLGAPAAFKYFDTTIDRKRYTSTKEVLDATLIHQSITGLYETRIDLSQLGGDSGGSKRTADGSEFEPKKKRKVGGGGSGATNFSLLKQAGDVEENPGPMVSKGEELFTGVVPILVELDGDVNGHKFSVSGEGEGDATYGKLTLKFICTTGKLPVPWPTLVTTLTYGVQCFSRYPDHMKQHDFFKSAMPEGYVQERTIFFKDDGNYKTRAEVKFEGDTLVNRIELKGIDFKEDGNILGHKLEYNYNSHNVYIMADKQKNGIKVNFKIRHNIEDGSVQLADHYQQNTPIGDGPVLLPDNHYLSTQSALSKDPNEKRDHMVLLEFVTAAGITLGMDELYK

SEQ ID NO: 207 - protein, 1711 aa, Artificial Sequence
  Description of Artificial Sequence: Synthetic polypeptide
MKRTADGSEFESPKKKRKVSGGSSGGSSGSETPGTSESATPESSGGSSGGSDKKYSIGLAIGTNSVGWAVITDEYKVPSKKFKVLGNTDRHSIKKNLIGALLFDSGETAEATRLKRTARRRYTRRKNRICYLQEIFSNEMAKVDDSFFHRLEESFLVEEDKKHERHPIFGNIVDEVAYHEKYPTIYHLRKKLVDSTDKADLRLIYLALAHMIKFRGHFLIEGDLNPDNSDVDKLFIQLVQTYNQLFEENPINASGVDAKAILSARLSKSRRLENLIAQLPGEKKNGLFGNLIALSLGLTPNFKSNFDLAEDAKLQLSKDTYDDDLDNLLAQIGDQYADLFLAAKNLSDAILLSDILRVNTEITKAPLSASMIKRYDEHHQDLTLLKALVRQQLPEKYKEIFFDQSKNGYAGYIDGGASQEEFYKFIKPILEKMDGTEELLVKLNREDLLRKQRTFDNGSIPHQIHLGELHAILRRQEDFYPFLKDNREKIEKILTFRIPYYVGPLARGNSRFAWMTRKSEETITPWNFEEVVDKGASAQSFIERMTNFDKNLPNEKVLPKHSLLYEYFTVYNELTKVKYVTEGMRKPAFLSGEQKKAIVDLLFKTNRKVTVKQLKEDYFKKIECFDSVEISGVEDRFNASLGTYHDLLKIIKDKDFLDNEENEDILEDIVLTLTLFEDREMIEERLKTYAHLFDDKVMKQLKRRRYTGWGRLSRKLINGIRDKQSGKTILDFLKSDGFANRNFMQLIHDDSLTFKEDIQKAQVSGQGDSLHEHIANLAGSPAIKKGILQTVKVVDELVKVMGRHKPENIVIEMARENQTTQKGQKNSRERMKRIEEGIKELGSQILKEHPVENTQLQNEKLYLYYLQNGRDMYVDQELDINRLSDYDVDHIVPQSFLKDDSIDNKVLTRSDKNRGKSDNVPSEEVVKKMKNYWRQLLNAKLITQRKFDNLTKAERGGLSELDKAGFIKRQLVETRQITKHVAQILDSRMNTKYDENDKLIREVKVITLKSKLVSDFRKDFQFYKVREINNYHHAHDAYLNAVVGTALIKKYPKLESEFVYGDYKVYDVRKMIAKSEQEIGKATAKYFFYSNIMNFFKTEITLANGEIRKRPLIETNGETGEIVWDKGRDFATVRKVLSMPQVNIVKKTEVQTGGFSKESIRPKRNSDKLIARKKDWDPKKYGGFVSPTVAYSVLVVAKVEKGKSKKLKSVKELLGITIMERSSFEKNPIDFLEAKGYKEVKKDLIIKLPKYSLFELENGRKRMLASARFLQKGNELALPSKYVNFLYLASHYEKLKGSPEDNEQKQLFVEQHKHYLDEIIEQISEFSKRVILADANLDKVLSAYNKHRDKPIREQAENIIHLFTLTNLGAPRAFKYFDTTIDRKVYRSTKEVLDATLIHQSITGLYETRIDLSQLGGDSGGSKRTADGSEFEPKKKRKVGSGATNFSLLKQAGDVEENPGPMVSKGEELFTGVVPILVELDGDVNGHKFSVSGEGEGDATYGKLTLKFICTTGKLPVPWPTLVTTLTYGVQCFSRYPDHMKQHDFFKSAMPEGYVQERTIFFKDDGNYKTRAEVKFEGDTLVNRIELKGIDFKEDGNILGHKLEYNYNSHNVYIMADKQKNGIKVNFKIRHNIEDGSVQLADHYQQNTPIGDGPVLLPDNHYLSTQSALSKDPNEKRDHMVLLEFVTAAGITLGMDELYKSGGSPKKKRKV

SEQ ID NO: 208 - protein, 2169 aa, Artificial Sequence
  Description of Artificial Sequence: Synthetic polypeptide
MKRTADGSEFESPKKKRKVANELTWHDVLAEEKQQPYFLNTLQTVASERQSGVTIYPPQKDVFNAFRFTELGDVKVVILGQDPYHGPGQAHGLAFSVRPGIAIPPSLLNMYKELENTIPGFTRPNHGYLESWARQGVLLLNTVLTVRAGQAHSHASLGWETFTDKVISLINQHREGVVFLLWGSHAQKKGAIIDKQRHHVLKAPHPSPLSAHRGFFGCNHFVLANQWLEQRGETPIDWMPVLPAESESGGSGGSGGSSSETGPVAVDPTLRRRIEPHEFEVFFDPRELAKETCLLYEINWGGRHSIWRHTSQNTNKHVEVNFIEKFTTERYFCPNTRCSITWFLSWSPCGECSRAITEFLSRYPHVTLFIYIARLYHHADPRNRQGLRDLISSGVTIQIMTEQESGYCWRNFVNYSPSNEAHWPRYPHLWVRLYVLELYCIILGLPPCLNILRRKQPQLTFFTIALQSCHYQRLPPHILWATGLKSGGSSGGSSGSETPGTSESATPESSGGSSGGSDKKYSIGLAIGTNSVGWAVITDEYKVPSKKFKVLGNTDRHSIKKNLIGALLFDSGETAEATRLKRTARRRYTRRKNRICYLQEIFSNEMAKVDDSFFHRLEESFLVEEDKKHERHPIFGNIVDEVAYHEKYPTIYHLRKKLVDSTDKADLRLIYLALAHMIKFRGHFLIEGDLNPDNSDVDKLFIQLVQTYNQLFEENPINASGVDAKAILSARLSKSRRLENLIAQLPGEKKNGLFGNLIALSLGLTPNFKSNFDLAEDAKLQLSKDTYDDDLDNLLAQIGDQYADLFLAAKNLSDAILLSDILRVNTEITKAPLSASMIKRYDEHHQDLTLLKALVRQQLPEKYKEIFFDQSKNGYAGYIDGGASQEEFYKFIKPILEKMDGTEELLVKLNREDLLRKQRTFDNGSIPHQIHLGELHAILRRQEDFYPFLKDNREKIEKILTFRIPYYVGPLARGNSRFAWMTRKSEETITPWNFEEVVDKGASAQSFIERMTNFDKNLPNEKVLPKHSLLYEYFTVYNELTKVKYVTEGMRKPAFLSGEQKKAIVDLLFKTNRKVTVKQLKEDYFKKIECFDSVEISGVEDRFNASLGTYHDLLKIIKDKDFLDNEENEDILEDIVLTLTLFEDREMIEERLKTYAHLFDDKVMKQLKRRRYTGWGRLSRKLINGIRDKQSGKTILDFLKSDGFANRNFMQLIHDDSLTFKEDIQKAQVSGQGDSLHEHIANLAGSPAIKKGILQTVKVVDELVKVMGRHKPENIVIEMARENQTTQKGQKNSRERMKRIEEGIKELGSQILKEHPVENTQLQNEKLYLYYLQNGRDMYVDQELDINRLSDYDVDHIVPQSFLKDDSIDNKVLTRSDKNRGKSDNVPSEEVVKKMKNYWRQLLNAKLITQRKFDNLTKAERGGLSELDKAGFIKRQLVETRQITKHVAQILDSRMNTKYDENDKLIREVKVITLKSKLVSDFRKDFQFYKVREINNYHHAHDAYLNAVVGTALIKKYPKLESEFVYGDYKVYDVRKMIAKSEQEIGKATAKYFFYSNIMNFFKTEITLANGEIRKRPLIETNGETGEIVWDKGRDFATVRKVLSMPQVNIVKKTEVQTGGFSKESIRPKRNSDKLIARKKDWDPKKYGGFVSPTVAYSVLVVAKVEKGKSKKLKSVKELLGITIMERSSFEKNPIDFLEAKGYKEVKKDLIIKLPKYSLFELENGRKRMLASARFLQKGNELALPSKYVNFLYLASHYEKLKGSPEDNEQKQLFVEQHKHYLDEIIEQISEFSKRVILADANLDKVLSAYNKHRDKPIREQAENIIHLFTLTNLGAPRAFKYFDTTIDRKVYRSTKEVLDATLIHQSITGLYETRIDLSQLGGDSGGSKRTADGSEFEPKKKRKVGGGGSGATNFSLLKQAGDVEENPGPMVSKGEELFTGVVPILVELDGDVNGHKFSVSGEGEGDATYGKLTLKFICTTGKLPVPWPTLVTTLTYGVQCFSRYPDHMKQHDFFKSAMPEGYVQERTIFFKDDGNYKTRAEVKFEGDTLVNRIELKGIDFKEDGNILGHKLEYNYNSHNVYIMADKQKNGIKVNFKIRHNIEDGSVQLADHYQQNTPIGDGPVLLPDNHYLSTQSALSKDPNEKRDHMVLLEFVTAAGITLGMDELYK

SEQ ID NO: 209 - protein, 1931 aa, Artificial Sequence
  Description of Artificial Sequence: Synthetic polypeptide
MKRTADGSEFESPKKKRKVSSETGPVAVDPTLRRRIEPHEFEVFFDPRELAKETCLLYEINWGGRHSIWRHTSQNTNKHVEVNFIEKFTTERYFCPNTRCSITWFLSWSPCGECSRAITEFLSRYPHVTLFIYIARLYHHADPRNRQGLRDLISSGVTIQIMTEQESGYCWRNFVNYSPSNEAHWPRYPHLWVRLYVLELYCIILGLPPCLNILRRKQPQLTFFTIALQSCHYQRLPPHILWATGLKSGGSSGGSSGSETPGTSESATPESSGGSSGGSDKKYSIGLAIGTNSVGWAVITDEYKVPSKKFKVLGNTDRHSIKKNLIGALLFDSGETAEATRLKRTARRRYTRRKNRICYLQEIFSNEMAKVDDSFFHRLEESFLVEEDKKHERHPIFGNIVDEVAYHEKYPTIYHLRKKLVDSTDKADLRLIYLALAHMIKFRGHFLIEGDLNPDNSDVDKLFIQLVQTYNQLFEENPINASGVDAKAILSARLSKSRRLENLIAQLPGEKKNGLFGNLIALSLGLTPNFKSNFDLAEDAKLQLSKDTYDDDLDNLLAQIGDQYADLFLAAKNLSDAILLSDILRVNTEITKAPLSASMIKRYDEHHQDLTLLKALVRQQLPEKYKEIFFDQSKNGYAGYIDGGASQEEFYKFIKPILEKMDGTEELLVKLNREDLLRKQRTFDNGSIPHQIHLGELHAILRRQEDFYPFLKDNREKIEKILTFRIPYYVGPLARGNSRFAWMTRKSEETITPWNFEEVVDKGASAQSFIERMTNFDKNLPNEKVLPKHSLLYEYFTVYNELTKVKYVTEGMRKPAFLSGEQKKAIVDLLFKTNRKVTVKQLKEDYFKKIECFDSVEISGVEDRFNASLGTYHDLLKIIKDKDFLDNEENEDILEDIVLTLTLFEDREMIEERLKTYAHLFDDKVMKQLKRRRYTGWGRLSRKLINGIRDKQSGKTILDFLKSDGFANRNFMQLIHDDSLTFKEDIQKAQVSGQGDSLHEHIANLAGSPAIKKGILQTVKVVDELVKVMGRHKPENIVIEMARENQTTQKGQKNSRERMKRIEEGIKELGSQILKEHPVENTQLQNEKLYLYYLQNGRDMYVDQELDINRLSDYDVDHIVPQSFLKDDSIDNKVLTRSDKNRGKSDNVPSEEVVKKMKNYWRQLLNAKLITQRKFDNLTKAERGGLSELDKAGFIKRQLVETRQITKHVAQILDSRMNTKYDENDKLIREVKVITLKSKLVSDFRKDFQFYKVREINNYHHAHDAYLNAVVGTALIKKYPKLESEFVYGDYKVYDVRKMIAKSEQEIGKATAKYFFYSNIMNFFKTEITLANGEIRKRPLIETNGETGEIVWDKGRDFATVRKVLSMPQVNIVKKTEVQTGGFSKESIRPKRNSDKLIARKKDWDPKKYGGFVSPTVAYSVLVVAKVEKGKSKKLKSVKELLGITIMERSSFEKNPIDFLEAKGYKEVKKDLIIKLPKYSLFELENGRKRMLASARFLQKGNELALPSKYVNFLYLASHYEKLKGSPEDNEQKQLFVEQHKHYLDEIIEQISEFSKRVILADANLDKVLSAYNKHRDKPIREQAENIIHLFTLTNLGAPRAFKYFDTTIDRKVYRSTKEVLDATLIHQSITGLYETRIDLSQLGGDSGGSKRTADGSEFEPKKKRKVGGGGSGATNFSLLKQAGDVEENPGPMVSKGEELFTGVVPILVELDGDVNGHKFSVSGEGEGDATYGKLTLKFICTTGKLPVPWPTLVTTLTYGVQCFSRYPDHMKQHDFFKSAMPEGYVQERTIFFKDDGNYKTRAEVKFEGDTLVNRIELKGIDFKEDGNILGHKLEYNYNSHNVYIMADKQKNGIKVNFKIRHNIEDGSVQLADHYQQNTPIGDGPVLLPDNHYLSTQSALSKDPNEKRDHMVLLEFVTAAGITLGMDELYK

SEQ ID NO: 210 - protein, 1711 aa, Artificial Sequence
  Description of Artificial Sequence: Synthetic polypeptide
MKRTADGSEFESPKKKRKVSGGSSGGSSGSETPGTSESATPESSGGSSGGSDKKYSIGLAIGTNSVGWAVITDEYKVPSKKFKVLGNTDRHSIKKNLIGALLFDSGETAEATRLKRTARRRYTRRKNRICYLQEIFSNEMAKVDDSFFHRLEESFLVEEDKKHERHPIFGNIVDEVAYHEKYPTIYHLRKKLVDSTDKADLRLIYLALAHMIKFRGHFLIEGDLNPDNSDVDKLFIQLVQTYNQLFEENPINASGVDAKAILSARLSKSRRLENLIAQLPGEKKNGLFGNLIALSLGLTPNFKSNFDLAEDAKLQLSKDTYDDDLDNLLAQIGDQYADLFLAAKNLSDAILLSDILRVNTEITKAPLSASMIKRYDEHHQDLTLLKALVRQQLPEKYKEIFFDQSKNGYAGYIDGGASQEEFYKFIKPILEKMDGTEELLVKLNREDLLRKQRTFDNGSIPHQIHLGELHAILRRQEDFYPFLKDNREKIEKILTFRIPYYVGPLARGNSRFAWMTRKSEETITPWNFEEVVDKGASAQSFIERMTNFDKNLPNEKVLPKHSLLYEYFTVYNELTKVKYVTEGMRKPAFLSGEQKKAIVDLLFKTNRKVTVKQLKEDYFKKIECFDSVEISGVEDRFNASLGTYHDLLKIIKDKDFLDNEENEDILEDIVLTLTLFEDREMIEERLKTYAHLFDDKVMKQLKRRRYTGWGRLSRKLINGIRDKQSGKTILDFLKSDGFANRNFMQLIHDDSLTFKEDIQKAQVSGQGDSLHEHIANLAGSPAIKKGILQTVKVVDELVKVMGRHKPENIVIEMARENQTTQKGQKNSRERMKRIEEGIKELGSQILKEHPVENTQLQNEKLYLYYLQNGRDMYVDQELDINRLSDYDVDHIVPQSFLKDDSIDNKVLTRSDKNRGKSDNVPSEEVVKKMKNYWRQLLNAKLITQRKFDNLTKAERGGLSELDKAGFIKRQLVETRQITKHVAQILDSRMNTKYDENDKLIREVKVITLKSKLVSDFRKDFQFYKVREINNYHHAHDAYLNAVVGTALIKKYPKLESEFVYGDYKVYDVRKMIAKSEQEIGKATAKYFFYSNIMNFFKTEITLANGEIRKRPLIETNGETGEIVWDKGRDFATVRKVLSMPQVNIVKKTEVQTGGFSKESILPKRNSDKLIARKKDWDPKKYGGFVSPTVAYSVLVVAKVEKGKSKKLKSVKELLGITIMERSSFEKNPIDFLEAKGYKEVKKDLIIKLPKYSLFELENGRKRMLASARELQKGNELALPSKYVNFLYLASHYEKLKGSPEDNEQKQLFVEQHKHYLDEIIEQISEFSKRVILADANLDKVLSAYNKHRDKPIREQAENIIHLFTLTNLGAPAAFKYFDTTIDRKQYRSTKEVLDATLIHQSITGLYETRIDLSQLGGDSGGSKRTADGSEFEPKKKRKVGSGATNFSLLKQAGDVEENPGPMVSKGEELFTGVVPILVELDGDVNGHKFSVSGEGEGDATYGKLTLKFICTTGKLPVPWPTLVTTLTYGVQCFSRYPDHMKQHDFFKSAMPEGYVQERTIFFKDDGNYKTRAEVKFEGDTLVNRIELKGIDFKEDGNILGHKLEYNYNSHNVYIMADKQKNGIKVNFKIRHNIEDGSVQLADHYQQNTPIGDGPVLLPDNHYLSTQSALSKDPNEKRDHMVLLEFVTAAGITLGMDELYKSGGSPKKKRKV

SEQ ID NO: 211 - protein, 2169 aa, Artificial Sequence
  Description of Artificial Sequence: Synthetic polypeptide
MKRTADGSEFESPKKKRKVANELTWHDVLAEEKQQPYFLNTLQTVASERQSGVTIYPPQKDVFNAFRFTELGDVKVVILGQDPYHGPGQAHGLAFSVRPGIAIPPSLLNMYKELENTIPGFTRPNHGYLESWARQGVLLLNTVLTVRAGQAHSHASLGWETFTDKVISLINQHREGVVFLLWGSHAQKKGAIIDKQRHHVLKAPHPSPLSAHRGFFGCNHFVLANQWLEQRGETPIDWMPVLPAESESGGSGGSGGSSSETGPVAVDPTLRRRIEPHEFEVFFDPRELAKETCLLYEINWGGRHSIWRHTSQNTNKHVEVNFIEKFTTERYFCPNTRCSITWFLSWSPCGECSRAITEFLSRYPHVTLFIYIARLYHHADPRNRQGLRDLISSGVTIQIMTEQESGYCWRNFVNYSPSNEAHWPRYPHLWVRLYVLELYCIILGLPPCLNILRRKQPQLTFFTIALQSCHYQRLPPHILWATGLKSGGSSGGSSGSETPGTSESATPESSGGSSGGSDKKYSIGLAIGTNSVGWAVITDEYKVPSKKFKVLGNTDRHSIKKNLIGALLFDSGETAEATRLKRTARRRYTRRKNRICYLQEIFSNEMAKVDDSFFHRLEESFLVEEDKKHERHPIFGNIVDEVAYHEKYPTIYHLRKKLVDSTDKADLRLIYLALAHMIKFRGHFLIEGDLNPDNSDVDKLFIQLVQTYNQLFEENPINASGVDAKAILSARLSKSRRLENLIAQLPGEKKNGLFGNLIALSLGLTPNFKSNFDLAEDAKLQLSKDTYDDDLDNLLAQIGDQYADLFLAAKNLSDAILLSDILRVNTEITKAPLSASMIKRYDEHHQDLTLLKALVRQQLPEKYKEIFFDQSKNGYAGYIDGGASQEEFYKFIKPILEKMDGTEELLVKLNREDLLRKQRTFDNGSIPHQIHLGELHAILRRQEDFYPFLKDNREKIEKILTFRIPYYVGPLARGNSRFAWMTRKSEETITPWNFEEVVDKGASAQSFIERMTNFDKNLPNEKVLPKHSLLYEYFTVYNELTKVKYVTEGMRKPAFLSGEQKKAIVDLLFKTNRKVTVKQLKEDYFKKIECFDSVEISGVEDRFNASLGTYHDLLKIIKDKDFLDNEENEDILEDIVLTLTLFEDREMIEERLKTYAHLFDDKVMKQLKRRRYTGWGRLSRKLINGIRDKQSGKTILDFLKSDGFANRNFMQLIHDDSLTFKEDIQKAQVSGQGDSLHEHIANLAGSPAIKKGILQTVKVVDELVKVMGRHKPENIVIEMARENQTTQKGQKNSRERMKRIEEGIKELGSQILKEHPVENTQLQNEKLYLYYLQNGRDMYVDQELDINRLSDYDVDHIVPQSFLKDDSIDNKVLTRSDKNRGKSDNVPSEEVVKKMKNYWRQLLNAKLITQRKFDNLTKAERGGLSELDKAGFIKRQLVETRQITKHVAQILDSRMNTKYDENDKLIREVKVITLKSKLVSDFRKDFQFYKVREINNYHHAHDAYLNAVVGTALIKKYPKLESEFVYGDYKVYDVRKMIAKSEQEIGKATAKYFFYSNIMNFFKTEITLANGEIRKRPLIETNGETGEIVWDKGRDFATVRKVLSMPQVNIVKKTEVQTGGFSKESILPKRNSDKLIARKKDWDPKKYGGFVSPTVAYSVLVVAKVEKGKSKKLKSVKELLGITIMERSSFEKNPIDFLEAKGYKEVKKDLIIKLPKYSLFELENGRKRMLASARELQKGNELALPSKYVNFLYLASHYEKLKGSPEDNEQKQLFVEQHKHYLDEIIEQISEFSKRVILADANLDKVLSAYNKHRDKPIREQAENIIHLFTLTNLGAPAAFKYFDTTIDRKQYRSTKEVLDATLIHQSITGLYETRIDLSQLGGDSGGSKRTADGSEFEPKKKRKVGGGGSGATNFSLLKQAGDVEENPGPMVSKGEELFTGVVPILVELDGDVNGHKFSVSGEGEGDATYGKLTLKFICTTGKLPVPWPTLVTTLTYGVQCFSRYPDHMKQHDFFKSAMPEGYVQERTIFFKDDGNYKTRAEVKFEGDTLVNRIELKGIDFKEDGNILGHKLEYNYNSHNVYIMADKQKNGIKVNFKIRHNIEDGSVQLADHYQQNTPIGDGPVLLPDNHYLSTQSALSKDPNEKRDHMVLLEFVTAAGITLGMDELYK

SEQ ID NO: 212 - protein, 1931 aa, Artificial Sequence
  Description of Artificial Sequence: Synthetic polypeptide
MKRTADGSEFESPKKKRKVSSETGPVAVDPTLRRRIEPHEFEVFFDPRELAKETCLLYEINWGGRHSIWRHTSQNTNKHVEVNFIEKFTTERYFCPNTRCSITWFLSWSPCGECSRAITEFLSRYPHVTLFIYIARLYHHADPRNRQGLRDLISSGVTIQIMTEQESGYCWRNFVNYSPSNEAHWPRYPHLWVRLYVLELYCIILGLPPCLNILRRKQPQLTFFTIALQSCHYQRLPPHILWATGLKSGGSSGGSSGSETPGTSESATPESSGGSSGGSDKKYSIGLAIGTNSVGWAVITDEYKVPSKKFKVLGNTDRHSIKKNLIGALLFDSGETAEATRLKRTARRRYTRRKNRICYLQEIFSNEMAKVDDSFFHRLEESFLVEEDKKHERHPIFGNIVDEVAYHEKYPTIYHLRKKLVDSTDKADLRLIYLALAHMIKFRGHFLIEGDLNPDNSDVDKLFIQLVQTYNQLFEENPINASGVDAKAILSARLSKSRRLENLIAQLPGEKKNGLFGNLIALSLGLTPNFKSNFDLAEDAKLQLSKDTYDDDLDNLLAQIGDQYADLFLAAKNLSDAILLSDILRVNTEITKAPLSASMIKRYDEHHQDLTLLKALVRQQLPEKYKEIFFDQSKNGYAGYIDGGASQEEFYKFIKPILEKMDGTEELLVKLNREDLLRKQRTFDNGSIPHQIHLGELHAILRRQEDFYPFLKDNREKIEKILTFRIPYYVGPLARGNSRFAWMTRKSEETITPWNFEEVVDKGASAQSFIERMTNFDKNLPNEKVLPKHSLLYEYFTVYNELTKVKYVTEGMRKPAFLSGEQKKAIVDLLFKTNRKVTVKQLKEDYFKKIECFDSVEISGVEDRFNASLGTYHDLLKIIKDKDFLDNEENEDILEDIVLTLTLFEDREMIEERLKTYAHLFDDKVMKQLKRRRYTGWGRLSRKLINGIRDKQSGKTILDFLKSDGFANRNFMQLIHDDSLTFKEDIQKAQVSGQGDSLHEHIANLAGSPAIKKGILQTVKVVDELVKVMGRHKPENIVIEMARENQTTQKGQKNSRERMKRIEEGIKELGSQILKEHPVENTQLQNEKLYLYYLQNGRDMYVDQELDINRLSDYDVDHIVPQSFLKDDSIDNKVLTRSDKNRGKSDNVPSEEVVKKMKNYWRQLLNAKLITQRKFDNLTKAERGGLSELDKAGFIKRQLVETRQITKHVAQILDSRMNTKYDENDKLIREVKVITLKSKLVSDFRKDFQFYKVREINNYHHAHDAYLNAVVGTALIKKYPKLESEFVYGDYKVYDVRKMIAKSEQEIGKATAKYFFYSNIMNFFKTEITLANGEIRKRPLIETNGETGEIVWDKGRDFATVRKVLSMPQVNIVKKTEVQTGGFSKESILPKRNSDKLIARKKDWDPKKYGGFVSPTVAYSVLVVAKVEKGKSKKLKSVKELLGITIMERSSFEKNPIDFLEAKGYKEVKKDLIIKLPKYSLFELENGRKRMLASARELQKGNELALPSKYVNFLYLASHYEKLKGSPEDNEQKQLFVEQHKHYLDEIIEQISEFSKRVILADANLDKVLSAYNKHRDKPIREQAENIIHLFTLTNLGAPAAFKYFDTTIDRKQYRSTKEVLDATLIHQSITGLYETRIDLSQLGGDSGGSKRTADGSEFEPKKKRKVGGGGSGATNFSLLKQAGDVEENPGPMVSKGEELFTGVVPILVELDGDVNGHKFSVSGEGEGDATYGKLTLKFICTTGKLPVPWPTLVTTLTYGVQCFSRYPDHMKQHDFFKSAMPEGYVQERTIFFKDDGNYKTRAEVKFEGDTLVNRIELKGIDFKEDGNILGHKLEYNYNSHNVYIMADKQKNGIKVNFKIRHNIEDGSVQLADHYQQNTPIGDGPVLLPDNHYLSTQSALSKDPNEKRDHMVLLEFVTAAGITLGMDELYK

SEQ ID NO: 213 - protein, 1701 aa, Artificial Sequence
  Description of Artificial Sequence: Synthetic polypeptide
MKRTADGSEFESPKKKRKVDKKYSIGLDIGTNSVGWAVITDEYKVPSKKFKVLGNTDRHSIKKNLIGALLFDSGETAEATRLKRTARRRYTRRKNRICYLQEIFSNEMAKVDDSFFHRLEESFLVEEDKKHERHPIFGNIVDEVAYHEKYPTIYHLRKKLVDSTDKADLRLIYLALAHMIKFRGHFLIEGDLNPDNSDVDKLFIQLVQTYNQLFEENPINASGVDAKAILSARLSKSRRLENLIAQLPGEKKNGLFGNLIALSLGLTPNFKSNFDLAEDAKLQLSKDTYDDDLDNLLAQIGDQYADLFLAAKNLSDAILLSDILRVNTEITKAPLSASMIKRYDEHHQDLTLLKALVRQQLPEKYKEIFFDQSKNGYAGYIDGGASQEEFYKFIKPILEKMDGTEELLVKLNREDLLRKQRTFDNGSIPHQIHLGELHAILRRQEDFYPFLKDNREKIEKILTFRIPYYVGPLARGNSRFAWMTRKSEETITPWNFEEVVDKGASAQSFIERMTNFDKNLPNEKVLPKHSLLYEYFTVYNELTKVKYVTEGMRKPAFLSGEQKKAIVDLLFKTNRKVTVKQLKEDYFKKIECFDSVEISGVEDRFNASLGTYHDLLKIIKDKDFLDNEENEDILEDIVLTLTLFEDREMIEERLKTYAHLFDDKVMKQLKRRRYTGWGRLSRKLINGIRDKQSGKTILDFLKSDGFANRNFMQLIHDDSLTFKEDIQKAQVSGQGDSLHEHIANLAGSPAIKKGILQTVKVVDELVKVMGRHKPENIVIEMARENQTTQKGQKNSRERMKRIEEGIKELGSQILKEHPVENTQLQNEKLYLYYLQNGRDMYVDQELDINRLSDYDVDAIVPQSFLKDDSIDNKVLTRSDKNRGKSDNVPSEEVVKKMKNYWRQLLNAKLITQRKFDNLTKAERGGLSELDKAGFIKRQLVETRQITKHVAQILDSRMNTKYDENDKLIREVKVITLKSKLVSDFRKDFQFYKVREINNYHHAHDAYLNAVVGTALIKKYPKLESEFVYGDYKVYDVRKMIAKSEQEIGKATAKYFFYSNIMNFFKTEITLANGEIRKRPLIETNGETGEIVWDKGRDFATVRKVLSMPQVNIVKKTEVQTGGFSKESILPKRNSDKLIARKKDWDPKKYGGFDSPTVAYSVLVVAKVEKGKSKKLKSVKELLGITIMERSSFEKNPIDFLEAKGYKEVKKDLIIKLPKYSLFELENGRKRMLASAGELQKGNELALPSKYVNFLYLASHYEKLKGSPEDNEQKQLFVEQHKHYLDEIIEQISEFSKRVILADANLDKVLSAYNKHRDKPIREQAENIIHLFTLTNLGAPAAFKYFDTTIDRKRYTSTKEVLDATLIHQSITGLYETRIDLSQLGGDSGGSSGGSSGSETPGTSESATPESSGGSSGGSSSGGSKRTADGSEFEPKKKRKVGSGATNFSLLKQAGDVEENPGPMVSKGEELFTGVVPILVELDGDVNGHKFSVSGEGEGDATYGKLTLKFICTTGKLPVPWPTLVTTLTYGVQCFSRYPDHMKQHDFFKSAMPEGYVQERTIFFKDDGNYKTRAEVKFEGDTLVNRIELKGIDFKEDGNILGHKLEYNYNSHNVYIMADKQKNGIKVNFKIRHNIEDGSVQLADHYQQNTPIGDGPVLLPDNHYLSTQSALSKDPNEKRDHMVLLEFVTAAGITLGMDELYK

SEQ ID NO: 214 - protein, 2378 aa, Artificial Sequence
  Description of Artificial Sequence: Synthetic polypeptide
MKRTADGSEFESPKKKRKVDKKYSIGLDIGTNSVGWAVITDEYKVPSKKFKVLGNTDRHSIKKNLIGALLFDSGETAEATRLKRTARRRYTRRKNRICYLQEIFSNEMAKVDDSFFHRLEESFLVEEDKKHERHPIFGNIVDEVAYHEKYPTIYHLRKKLVDSTDKADLRLIYLALAHMIKFRGHFLIEGDLNPDNSDVDKLFIQLVQTYNQLFEENPINASGVDAKAILSARLSKSRRLENLIAQLPGEKKNGLFGNLIALSLGLTPNFKSNFDLAEDAKLQLSKDTYDDDLDNLLAQIGDQYADLFLAAKNLSDAILLSDILRVNTEITKAPLSASMIKRYDEHHQDLTLLKALVRQQLPEKYKEIFFDQSKNGYAGYIDGGASQEEFYKFIKPILEKMDGTEELLVKLNREDLLRKQRTFDNGSIPHQIHLGELHAILRRQEDFYPFLKDNREKIEKILTFRIPYYVGPLARGNSRFAWMTRKSEETITPWNFEEVVDKGASAQSFIERMTNFDKNLPNEKVLPKHSLLYEYFTVYNELTKVKYVTEGMRKPAFLSGEQKKAIVDLLFKTNRKVTVKQLKEDYFKKIECFDSVEISGVEDRFNASLGTYHDLLKIIKDKDFLDNEENEDILEDIVLTLTLFEDREMIEERLKTYAHLFDDKVMKQLKRRRYTGWGRLSRKLINGIRDKQSGKTILDFLKSDGFANRNFMQLIHDDSLTFKEDIQKAQVSGQGDSLHEHIANLAGSPAIKKGILQTVKVVDELVKVMGRHKPENIVIEMARENQTTQKGQKNSRERMKRIEEGIKELGSQILKEHPVENTQLQNEKLYLYYLQNGRDMYVDQELDINRLSDYDVDAIVPQSFLKDDSIDNKVLTRSDKNRGKSDNVPSEEVVKKMKNYWRQLLNAKLITQRKFDNLTKAERGGLSELDKAGFIKRQLVETRQITKHVAQILDSRMNTKYDENDKLIREVKVITLKSKLVSDFRKDFQFYKVREINNYHHAHDAYLNAVVGTALIKKYPKLESEFVYGDYKVYDVRKMIAKSEQEIGKATAKYFFYSNIMNFFKTEITLANGEIRKRPLIETNGETGEIVWDKGRDFATVRKVLSMPQVNIVKKTEVQTGGFSKESILPKRNSDKLIARKKDWDPKKYGGFDSPTVAYSVLVVAKVEKGKSKKLKSVKELLGITIMERSSFEKNPIDFLEAKGYKEVKKDLIIKLPKYSLFELENGRKRMLASAGELQKGNELALPSKYVNFLYLASHYEKLKGSPEDNEQKQLFVEQHKHYLDEIIEQISEFSKRVILADANLDKVLSAYNKHRDKPIREQAENIIHLFTLTNLGAPAAFKYFDTTIDRKRYTSTKEVLDATLIHQSITGLYETRIDLSQLGGDSGGSSGGSSGSETPGTSESATPESSGGSSGGSSTLNIEDEYRLHETSKEPDVSLGSTWLSDFPQAWAETGGMGLAVRQAPLIIPLKATSTPVSIKQYPMSQEARLGIKPHIQRLLDQGILVPCQSPWNTPLLPVKKPGTNDYRPVQDLREVNKRVEDIHPTVPNPYNLLSGLPPSHQWYTVLDLKDAFFCLRLHPTSQPLFAFEWRDPEMGISGQLTWTRLPQGFKNSPTLFNEALHRDLADFRIQHPDLILLQYVDDLLLAATSELDCQQGTRALLQTLGNLGYRASAKKAQICQKQVKYLGYLLKEGQRWLTEARKETVMGQPTPKTPRQLREFLGKAGFCRLFIPGFAEMAAPLYPLTKPGTLFNWGPDQQKAYQEIKQALLTAPALGLPDLTKPFELFVDEKQGYAKGVLTQKLGPWRRPVAYLSKKLDPVAAGWPPCLRMVAAIAVLTKDAGKLTMGQPLVILAPHAVEALVKQPPDRWLSNARMTHYQALLLDTDRVQFGPVVALNPATLLPLPEEGLQHNCLDILAEAHGTRPDLTDQPLPDADHTWYTDGSSLLQEGQRKAGAAVTTETEVIWAKALPAGTSAQRAELIALTQALKMAEGKKLNVYTDSRYAFATAHIHGEIYRRRGWLTSEGKEIKNKDEILALLKALFLPKRLSIIHCPGHQKGHSAEARGNRMADQAARKAAITETPDTSTLLIENSSPSGGSKRTADGSEFEPKKKRKVGSGATNFSLLKQAGDVEENPGPMVSKGEELFTGVVPILVELDGDVNGHKFSVSGEGEGDATYGKLTLKFICTTGKLPVPWPTLVTTLTYGVQCFSRYPDHMKQHDFFKSAMPEGYVQERTIFFKDDGNYKTRAEVKFEGDTLVNRIELKGIDFKEDGNILGHKLEYNYNSHNVYIMADKQKNGIKVNFKIRHNIEDGSVQLADHYQQNTPIGDGPVLLPDNHYLSTQSALSKDPNEKRDHMVLLEFVTAAGITLGMDELYK

SEQ ID NO: 215 - protein, 1401 aa, Unknown
  Description of Unknown: wild type Cas9 sequence
MDKKYSIGLDIGTNSVGWAVITDEYKVPSKKFKVLGNTDRHSIKKNLIGALLFDSGETAEATRLKRTARRRYTRRKNRICYLQEIFSNEMAKVDDSFFHRLEESFLVEEDKKHERHPIFGNIVDEVAYHEKYPTIYHLRKKLVDSTDKADLRLIYLALAHMIKFRGHFLIEGDLNPDNSDVDKLFIQLVQTYNQLFEENPINASGVDAKAILSARLSKSRRLENLIAQLPGEKKNGLFGNLIALSLGLTPNFKSNFDLAEDAKLQLSKDTYDDDLDNLLAQIGDQYADLFLAAKNLSDAILLSDILRVNTEITKAPLSASMIKRYDEHHQDLTLLKALVRQQLPEKYKEIFFDQSKNGYAGYIDGGASQEEFYKFIKPILEKMDGTEELLVKLNREDLLRKQRTFDNGSIPHQIHLGELHAILRRQEDFYPFLKDNREKIEKILTFRIPYYVGPLARGNSRFAWMTRKSEETITPWNFEEVVDKGASAQSFIERMTNFDKNLPNEKVLPKHSLLYEYFTVYNELTKVKYVTEGMRKPAFLSGEQKKAIVDLLFKTNRKVTVKQLKEDYFKKIECFDSVEISGVEDRFNASLGTYHDLLKIIKDKDFLDNEENEDILEDIVLTLTLFEDREMIEERLKTYAHLFDDKVMKQLKRRRYTGWGRLSRKLINGIRDKQSGKTILDFLKSDGFANRNFMQLIHDDSLTFKEDIQKAQVSGQGDSLHEHIANLAGSPAIKKGILQTVKVVDELVKVMGRHKPENIVIEMARENQTTQKGQKNSRERMKRIEEGIKELGSQILKEHPVENTQLQNEKLYLYYLQNGRDMYVDQELDINRLSDYDVDHIVPQSFLKDDSIDNKVLTRSDKNRGKSDNVPSEEVVKKMKNYWRQLLNAKLITQRKFDNLTKAERGGLSELDKAGFIKRQLVETRQITKHVAQILDSRMNTKYDENDKLIREVKVITLKSKLVSDFRKDFQFYKVREINNYHHAHDAYLNAVVGTALIKKYPKLESEFVYGDYKVYDVRKMIAKSEQEIGKATAKYFFYSNIMNFFKTEITLANGEIRKRPLIETNGETGEIVWDKGRDFATVRKVLSMPQVNIVKKTEVQTGGFSKESILPKRNSDKLIARKKDWDPKKYGGFDSPTVAYSVLVVAKVEKGKSKKLKSVKELLGITIMERSSFEKNPIDFLEAKGYKEVKKDLIIKLPKYSLFELENGRKRMLASAGELQKGNELALPSKYVNFLYLASHYEKLKGSPEDNEQKQLFVEQHKHYLDEIIEQISEFSKRVILADANLDKVLSAYNKHRDKPIREQAENIIHLFTLTNLGAPAAFKYFDTTIDRKRYTSTKEVLDATLIHQSITGLYETRIDLSQLGGDGSPKKKRKVSSDYKDHDGDYKDHDIDYKDDDDK

SEQ ID NO: 216 - DNA, 20 bp, Artificial Sequence
  Description of Artificial Sequence: Synthetic oligonucleotide
gaatactaagcatagactcc

SEQ ID NO: 217 - DNA, 20 bp, Artificial Sequence
  Description of Artificial Sequence: Synthetic oligonucleotide
gtaaacaaagcatagactga

SEQ ID NO: 218 - DNA, 20 bp, Artificial Sequence
  Description of Artificial Sequence: Synthetic oligonucleotide
gaagaccaaggatagactgc

SEQ ID NO: 219 - DNA, 20 bp, Artificial Sequence
  Description of Artificial Sequence: Synthetic oligonucleotide
acacacacacttagaatctg

SEQ ID NO: 220 - DNA, 20 bp, Artificial Sequence
  Description of Artificial Sequence: Synthetic oligonucleotide
cacacacacttagaatctgt

SEQ ID NO: 221 - DNA, 20 bp, Artificial Sequence
  Description of Artificial Sequence: Synthetic oligonucleotide
ttaagctgtagtattatgaa

SEQ ID NO: 222 - DNA, 20 bp, Artificial Sequence
  Description of Artificial Sequence: Synthetic oligonucleotide
cctggcctgggtcaatcctt

SEQ ID NO: 223 - DNA, 20 bp, Artificial Sequence
  Description of Artificial Sequence: Synthetic oligonucleotide
gagtccgagcagaagaagaa

SEQ ID NO: 224 - DNA, 20 bp, Artificial Sequence
  Description of Artificial Sequence: Synthetic oligonucleotide
gtattcacctgaaagtgtgc

SEQ ID NO: 225 - DNA, 20 bp, Artificial Sequence
  Description of Artificial Sequence: Synthetic oligonucleotide
ggaatcccttctgcagcacc

SEQ ID NO: 226 - DNA, 20 bp, Artificial Sequence
  Description of Artificial Sequence: Synthetic oligonucleotide
gaacacaaagcatagactgc

SEQ ID NO: 227 - DNA, 20 bp, Artificial Sequence
  Description of Artificial Sequence: Synthetic oligonucleotide
ggcccagactgagcacgtga

SEQ ID NO: 228 - DNA, 20 bp, Artificial Sequence
  Description of Artificial Sequence: Synthetic oligonucleotide
ggcactgcggctggaggtgg

SEQ ID NO: 229 - DNA, 20 bp, Artificial Sequence
  Description of Artificial Sequence: Synthetic oligonucleotide
ctggcctgggtcaatccttg

SEQ ID NO: 230 - DNA, 20 bp, Artificial Sequence
  Description of Artificial Sequence: Synthetic oligonucleotide
caaagcaggatgacaggcag

SEQ ID NO: 231 - DNA, 20 bp, Artificial Sequence
  Description of Artificial Sequence: Synthetic oligonucleotide
acttccacatgagcgtggtc

SEQ ID NO: 232 - DNA, 20 bp, Artificial Sequence
  Description of Artificial Sequence: Synthetic oligonucleotide
ggcactcgggggcgagagga

SEQ ID NO: 233 - DNA, 20 bp, Artificial Sequence
  Description of Artificial Sequence: Synthetic oligonucleotide
gagctcactgaacgctggca

SEQ ID NO: 234 - DNA, 20 bp, Artificial Sequence
  Description of Artificial Sequence: Synthetic oligonucleotide
gaccctcagccgtgctgctc

SEQ ID NO: 235 - DNA, 20 bp, Artificial Sequence
  Description of Artificial Sequence: Synthetic oligonucleotide
gctgactcagagaccctgag

SEQ ID NO: 236 - DNA, 20 bp, Artificial Sequence
  Description of Artificial Sequence: Synthetic oligonucleotide
ggggctcaacatcggaagag

SEQ ID NO: 237 - DNA, 20 bp, Artificial Sequence
  Description of Artificial Sequence: Synthetic oligonucleotide
gctggctcaggttcaggaga

SEQ ID NO: 238 - DNA, 20 bp, Artificial Sequence
  Description of Artificial Sequence: Synthetic oligonucleotide
ctgctcggggtgggactctg

SEQ ID NO: 239 - DNA, 20 bp, Artificial Sequence
  Description of Artificial Sequence: Synthetic oligonucleotide
gtcatcttagtcattacctg

SEQ ID NO: 240 - DNA, 20 bp, Artificial Sequence
  Description of Artificial Sequence: Synthetic oligonucleotide
gaggacgtgtgtgtctgtgt

SEQ ID NO: 241 - DNA, 20 bp, Artificial Sequence
  Description of Artificial Sequence: Synthetic oligonucleotide
taagcatagactccaggata

SEQ ID NO: 242 - DNA, 20 bp, Artificial Sequence
  Description of Artificial Sequence: Synthetic oligonucleotide
tactctgagtgtacaaaaga

SEQ ID NO: 243 - DNA, 20 bp, Artificial Sequence
  Description of Artificial Sequence: Synthetic oligonucleotide
agtaaacaaagcatagactg

SEQ ID NO: 244 - DNA, 20 bp, Artificial Sequence
  Description of Artificial Sequence: Synthetic oligonucleotide
tttgtgcaaacacagattgc

SEQ ID NO: 245 - DNA, 20 bp, Artificial Sequence
  Description of Artificial Sequence: Synthetic oligonucleotide
cgggcatcagaattccctgg

SEQ ID NO: 246 - DNA, 20 bp, Artificial Sequence
  Description of Artificial Sequence: Synthetic oligonucleotide
aaagtacaaacggcagaagc

SEQ ID NO: 247 - DNA, 20 bp, Artificial Sequence
  Description of Artificial Sequence: Synthetic oligonucleotide
gtacaaacggcagaagctgg

SEQ ID NO: 248 - DNA, 20 bp, Artificial Sequence
  Description of Artificial Sequence: Synthetic oligonucleotide
gctgcagaagggattccatg

SEQ ID NO: 249 - DNA, 20 bp, Artificial Sequence
  Description of Artificial Sequence: Synthetic oligonucleotide
cgccgtctccaaggtgaaag

SEQ ID NO: 250 - DNA, 20 bp, Artificial Sequence
  Description of Artificial Sequence: Synthetic oligonucleotide
agcgatccaggtgctgcaga

SEQ ID NO: 251 - DNA, 20 bp, Artificial Sequence
  Description of Artificial Sequence: Synthetic oligonucleotide
ggaacacaaagcatagactg

SEQ ID NO: 252 - DNA, 20 bp, Artificial Sequence
  Description of Artificial Sequence: Synthetic oligonucleotide
tgtgttccagtttcctttac

SEQ ID NO: 253 - DNA, 20 bp, Artificial Sequence
  Description of Artificial Sequence: Synthetic oligonucleotide
ttgtttgcagctattcaggc

SEQ ID NO: 254 - DNA, 20 bp, Artificial Sequence
  Description of Artificial Sequence: Synthetic oligonucleotide
aagtcgagggagggatggta

SEQ ID NO: 255 - DNA, 20 bp, Artificial Sequence
  Description of Artificial Sequence: Synthetic oligonucleotide
gacacgtggattgtgctgtc

SEQ ID NO: 256 - DNA, 20 bp, Artificial Sequence
  Description of Artificial Sequence: Synthetic oligonucleotide
gtcatacactgggctggcca

SEQ ID NO: 257 - DNA, 20 bp, Artificial Sequence
  Description of Artificial Sequence: Synthetic oligonucleotide
caaagtccaggaccggctgg

SEQ ID NO: 258 - DNA, 20 bp, Artificial Sequence
  Description of Artificial Sequence: Synthetic oligonucleotide
gcatggctctagtgctttcc

SEQ ID NO: 259 - DNA, 20 bp, Artificial Sequence
  Description of Artificial Sequence: Synthetic oligonucleotide
ggtcatacactgggctggcc

SEQ ID NO: 260 - DNA, 20 bp, Artificial Sequence
  Description of Artificial Sequence: Synthetic oligonucleotide
aaggagacaaagtccaggac

SEQ ID NO: 261 - DNA, 20 bp, Artificial Sequence
  Description of Artificial Sequence: Synthetic oligonucleotide
gattgtgctgtcaggagctc

SEQ ID NO: 262 - DNA, 20 bp, Artificial Sequence
  Description of Artificial Sequence: Synthetic oligonucleotide
atgactaagatgactgccaa

SEQ ID NO: 263 - DNA, 20 bp, Artificial Sequence
  Description of Artificial Sequence: Synthetic oligonucleotide
tgagttacaacgaacacctc

SEQ ID NO: 264 - DNA, 20 bp, Artificial Sequence
  Description of Artificial Sequence: Synthetic oligonucleotide
accatcttttgtacactcag

SEQ ID NO: 265 - DNA, 20 bp, Artificial Sequence
  Description of Artificial Sequence: Synthetic oligonucleotide
cacttctcttcctgccctct

SEQ ID NO: 266 - DNA, 20 bp, Artificial Sequence
  Description of Artificial Sequence: Synthetic oligonucleotide
agcttctgccgtttgtactt

SEQ ID NO: 267 - DNA, 20 bp, Artificial Sequence
  Description of Artificial Sequence: Synthetic oligonucleotide
cgtctcatatgccccttggc

SEQ ID NO: 268 - DNA, 20 bp, Artificial Sequence
  Description of Artificial Sequence: Synthetic oligonucleotide
atagactccaggataaggta

SEQ ID NO: 269 - DNA, 20 bp, Artificial Sequence
  Description of Artificial Sequence: Synthetic oligonucleotide
ctcaacatcggaagagggga

SEQ ID NO: 270 - DNA, 20 bp, Artificial Sequence
  Description of Artificial Sequence: Synthetic oligonucleotide
tcaatccttggggcccagac

SEQ ID NO: 271 - DNA, 20 bp, Artificial Sequence
  Description of Artificial Sequence: Synthetic oligonucleotide
atgttccaatcagtacgcag

SEQ ID NO: 272 - DNA, 20 bp, Artificial Sequence
  Description of Artificial Sequence: Synthetic oligonucleotide
gatgactgccaaggggcata

SEQ ID NO: 273 - DNA, 20 bp, Artificial Sequence
  Description of Artificial Sequence: Synthetic oligonucleotide
aagtacaagcactcaatgtg

SEQ ID NO: 274 - DNA, 20 bp, Artificial Sequence
  Description of Artificial Sequence: Synthetic oligonucleotide
acacacacttagaatctgtg

SEQ ID NO: 275 - DNA, 20 bp, Artificial Sequence
  Description of Artificial Sequence: Synthetic oligonucleotide
gcggacagtggacgcggcgg

SEQ ID NO: 276 - DNA, 20 bp, Artificial Sequence
  Description of Artificial Sequence: Synthetic oligonucleotide
gaacacaatgcatagattgc

SEQ ID NO: 277 - DNA, 20 bp, Artificial Sequence
  Description of Artificial Sequence: Synthetic oligonucleotide
aaacataaagcatagactgc

SEQ ID NO: 278 - DNA, 20 bp, Artificial Sequence
  Description of Artificial Sequence: Synthetic oligonucleotide
cacccagactgagcacgtgc

SEQ ID NO: 279 - DNA, 20 bp, Artificial Sequence
  Description of Artificial Sequence: Synthetic oligonucleotide
gacacagactgggcacgtga

SEQ ID NO: 280 - DNA, 20 bp, Artificial Sequence
  Description of Artificial Sequence: Synthetic oligonucleotide
agctcagactgagcaagtga

SEQ ID NO: 281 - DNA, 20 bp, Artificial Sequence
  Description of Artificial Sequence: Synthetic oligonucleotide
agaccagactgagcaagaga

SEQ ID NO: 282 - DNA, 20 bp, Artificial Sequence
  Description of Artificial Sequence: Synthetic oligonucleotide
gagccagaatgagcacgtga

SEQ ID NO: 283 - DNA, 20 bp, Artificial Sequence
  Description of Artificial Sequence: Synthetic oligonucleotide
tgcactgcggccggaggagg

SEQ ID NO: 284 - DNA, 20 bp, Artificial Sequence
  Description of Artificial Sequence: Synthetic oligonucleotide
ggctctgcggctggaggggg

SEQ ID NO: 285 - DNA, 20 bp, Artificial Sequence
  Description of Artificial Sequence: Synthetic oligonucleotide
ggcacgacggctggaggtgg

SEQ ID NO: 286 - DNA, 20 bp, Artificial Sequence
  Description of Artificial Sequence: Synthetic oligonucleotide
ggcatcacggctggaggtgg

SEQ ID NO: 287 - DNA, 20 bp, Artificial Sequence
  Description of Artificial Sequence: Synthetic oligonucleotide
ggcgctgcggcgggaggtgg

SEQ ID NO: 288 - DNA, 20 bp, Artificial Sequence
  Description of Artificial Sequence: Synthetic oligonucleotide
gagtctaagcagaagaagaa

SEQ ID NO: 289 - DNA, 20 bp, Artificial Sequence
  Description of Artificial Sequence: Synthetic oligonucleotide
gaggccgagcagaagaaaga

SEQ ID NO: 290 - DNA, 20 bp, Artificial Sequence
  Description of Artificial Sequence: Synthetic oligonucleotide
gagtcctagcaggagaagaa

SEQ ID NO: 291 - DNA, 20 bp, Artificial Sequence
  Description of Artificial Sequence: Synthetic oligonucleotide
gagtccgggaaggagaagaa

SEQ ID NO: 292 - DNA, 20 bp, Artificial Sequence
  Description of Artificial Sequence: Synthetic oligonucleotide
gagccggagcagaagaagga

SEQ ID NO: 293 - DNA, 20 bp, Artificial Sequence
  Description of Artificial Sequence: Synthetic oligonucleotide
ggaaccccgtctgcagcacc

SEQ ID NO: 294 - DNA, 20 bp, Artificial Sequence
  Description of Artificial Sequence: Synthetic oligonucleotide
ggagtccctcctacagcacc

SEQ ID NO: 295 - DNA, 20 bp, Artificial Sequence
  Description of Artificial Sequence: Synthetic oligonucleotide
agaggcccctctgcagcacc

SEQ ID NO: 296 - DNA, 20 bp, Artificial Sequence
  Description of Artificial Sequence: Synthetic oligonucleotide
accatccctcctgcagcacc

SEQ ID NO: 297 - DNA, 20 bp, Artificial Sequence
  Description of Artificial Sequence: Synthetic oligonucleotide
ggattgccatccgcagcacc

SEQ ID NO: 298 - DNA, 20 bp, Artificial Sequence
  Description of Artificial Sequence: Synthetic oligonucleotide
tgaatcccatctccagcacc

SEQ ID NO: 299 - DNA, 123 bp, Artificial Sequence
  Description of Artificial Sequence: Synthetic polynucleotide
  modified_base (1)..(20): a, c, t, g, unknown or other
  modified_base (97)..(116): a, c, t, g, unknown or other
nnnnnnnnnnnnnnnnnnnngttttagagctagaaatagcaagttaaaataaggctagtccgttatcaacttgaaaaagtggcaccgagtcggtgcnnnnnnnnnnnnnnnnnnnnttttttt

SEQ ID NO: 300 - DNA, 20 bp, Artificial Sequence
  Description of Artificial Sequence: Synthetic oligonucleotide
ctatattacttaccttatcc

SEQ ID NO: 301 - DNA, 39 bp, Artificial Sequence
  Description of Artificial Sequence: Synthetic oligonucleotide
gaatagtaagcatagactccaggataaggtaagtaatat

SEQ ID NO: 302 - DNA, 20 bp, Artificial Sequence
  Description of Artificial Sequence: Synthetic oligonucleotide
atgaggaaagggactagagt

SEQ ID NO: 303 - DNA, 51 bp, Artificial Sequence
  Description of Artificial Sequence: Synthetic oligonucleotide
gtaaagaaagcatagactgaggggtacaatcctactctagtccctttcctc

SEQ ID NO: 304 - DNA, 20 bp, Artificial Sequence
  Description of Artificial Sequence: Synthetic oligonucleotide
gctggccctgtaaaggaaac

SEQ ID NO: 305 - DNA, 31 bp, Artificial Sequence
  Description of Artificial Sequence: Synthetic oligonucleotide
gctttctgttccagtttcctttacagggcca

SEQ ID NO: 306 - DNA, 20 bp, Artificial Sequence
  Description of Artificial Sequence: Synthetic oligonucleotide
tgagttacaacgaacacctc

SEQ ID NO: 307 - DNA, 37 bp, Artificial Sequence
  Description of Artificial Sequence: Synthetic oligonucleotide
gtcatgttagtcattacctgaggtgttcgttgtaact

SEQ ID NO: 308 - DNA, 20 bp, Artificial Sequence
  Description of Artificial Sequence: Synthetic oligonucleotide
ggcccagactgagcacgtga

SEQ ID NO: 309 - DNA, 26 bp, Artificial Sequence
  Description of Artificial Sequence: Synthetic oligonucleotide
tctgccatcaaagcgtgctcagtctg

SEQ ID NO: 310 - DNA, 20 bp, Artificial Sequence
  Description of Artificial Sequence: Synthetic oligonucleotide
ggaatcccttctgcagcacc

SEQ ID NO: 311 - DNA, 30 bp, Artificial Sequence
  Description of Artificial Sequence: Synthetic oligonucleotide
ggaaaagcgatcaaggtgctgcagaaggga

SEQ ID NO: 312 - DNA, 20 bp, Artificial Sequence
  Description of Artificial Sequence: Synthetic oligonucleotide
agaatggcaggcacgtagta

SEQ ID NO: 313 - DNA, 20 bp, Artificial Sequence
  Description of Artificial Sequence: Synthetic oligonucleotide
tgcaacagctatgaaatagc

SEQ ID NO: 314 - DNA, 20 bp, Artificial Sequence
  Description of Artificial Sequence: Synthetic oligonucleotide
ttgtttgcagctattcaggc

SEQ ID NO: 315 - DNA, 20 bp, Artificial Sequence
  Description of Artificial Sequence: Synthetic oligonucleotide
tacacgtctcatatgcccct

SEQ ID NO: 316 - DNA, 20 bp, Artificial Sequence
  Description of Artificial Sequence: Synthetic oligonucleotide
gtcaaccagtatcccggtgc

SEQ ID NO: 317 - DNA, 20 bp, Artificial Sequence
  Description of Artificial Sequence: Synthetic oligonucleotide
gaagctcggaaaagcgatca

SEQ ID NO: 318 - protein, 306 aa, Mus musculus
MIGQKTLYSFFSPTPTGKRTTRSPEPVPGSGVAAEIGGDAVASPAKKARVEQNEQGSPLSAEQLVRIQRNKAAALLRLAARNVPAGFGESWKQQLCGEFGKPYFVKLMGFVAEERNHHKVYPPPEQVFTWTQMCDIRDVKVVILGQDPYHGPNQAHGLCFSVQRPVPPPPSLENIFKELSTDIDGFVHPGHGDLSGWARQGVLLLNAVLTVRAHQANSHKERGWEQFTDAVVSWLNQNLSGLVFLLWGSYAQKKGSVIDRKRHHVLQTAHPSPLSVHRGFLGCRHFSKANELLQKSGKKPINWKEL

SEQ ID NO: 319 - protein, 303 aa, Rattus norvegicus
MGILGPRPLKLARSLRAPRGARLRSLTPDPDSWQASPAKKARVEQDEPATPPSSPLSAEQLVRIQRNKAAALLRLAARNVPAGLGESWKQQLCGEFGKPYFVKLMGFVAEERKHHKVYPPPEQVFTWTQMCDIRDVKVVILGQDPYHGPNQAHGLCFSVQRPVPPPPSLENIFKELSTDIDGFVHPGHGDLSGWARQGVLLLNAVLTVRAHQANSHKERGWEQFTDAVVSWLNQNLNGLVFLLWGSYAQKKGSAIDRKRHHVLQTAHPSPLSVYRGFFGCRHFSKANELLQRSGKKPISWKEL

SEQ ID NO: 320 - protein, 359 aa, Saccharomyces cerevisiae
MWCMRRLPTNSVMTVARKRKQTTIEDFFGTKKSTNEAPNKKGKSGATFMTITNGAAIKTETKAVAKEANTDKYPANSNAKDVYSKNLSSNLRTLLSLELETIDDSWFPHLMDEFKKPYFVKLKQFVTKEQADHTVFPPAKDIYSWTRLTPFNKVKVVIIGQDPYHNFNQAHGLAFSVKPPTPAPPSLKNIYKELKQEYPDFVEDNKVGDLTHWASQGVLLLNTSLTVRAHNANSHSKHGWETFTKRVVQLLIQDREADGKSLVFLLWGNNAIKLVESLLGSTSVGSGSKYPNIMVMKSVHPSPLSASRGFFGTNHFKMINDWLYNTRGEKMIDWSVVPGTSLREVQEANARLESESKDP

SEQ ID NO: 321 - protein, 282 aa, Caenorhabditis elegans
MSKTVRIPDMFLKASAASKRKSASNTENIPEKVPAGNENQEVKKMKLQAPEPTEILLKSLLTGESWSKLLEEEFKKGYISKIEKFLNSEVNKGKQVFPPPTQIFTTFNLLPFDEISVVIIGQDPYHDDNQAHGLSFSVQKGVKPPPSLKNIYKELESDIEGFKRPDHGNLLGWTRQGVFMLNATLTVRAHEANSHAKIGWQTFTDTVIRIISRQSEKPIVFLLWGGFAHKKEELIDTKKHVVIKTAHPSPLSARKWWGCKCFSKCNTELENSGRNPINWADL

SEQ ID NO: 322 - protein, 330 aa, Arabidopsis thaliana [sequence omitted]

SEQ ID NO: 323 - protein, 291 aa, Danio rerio
MIGQKSIKSFFSPASKKRNLDEIKTGETRDDVKKQKLESGNEAPLSPEQLERIAKNKKAALERLQSAAPDGIGESWLKALSAEFGKSYFKSLMSFVGEERKKHTIYPPPHAVFTWTQTCDIKDVKVVILGQDPYHGPNQAHGLCFSVQRPVPPPPSLVNIFKELASDIEGFVQPDHGDLTGWANQGVLLLNAVLTVRAHQANSHKDKGWETFTDAVVHWLSSNMQGLVFILWGSYAQKKGAAINKKQHHVLQAVHPSPLSAHRGFFGCKHFSKANELLKKSGKKPIDWKAL

SEQ ID NO: 324 - protein, 313 aa, Oryctolagus cuniculus
MIGQKTLYSFFSPSPAGKRHTRSPEPAAPGTGVAAATEESRDAEASPAKKARAGKDEPGTPPSSPLSPEQLVRIQRNKAAALLRLAARNVPVGFGESWKKHLCGEFGKPYFIKLMGFVAEERKHHTVYPPPHQVFTWTQMCDIRDVKVVILGQDPYHGPSQAHGLCFSVQRPVPPPPSLENIYKELSTDIEGFVHPGHGDLSGWAKQGVLLLNAVLTVRAHQPTSHKDRGWEQFTDAVVSWLNHNSSGLVFLLWGSYAQRKGSAIDRKRHHVLQTAHPSPLSVYRGFFGCRHFSKTNELLRKSGKKPIDWTKL

SEQ ID NO: 325 - protein, 327 aa, Ursus maritimus
MARIQNLNSNSYTGSHARRTLTENKNCDNERALGVWGKGAGSLRLPVHEPRSPEPCKHRGPPKKARAVQEDPGTPPSSPLSPEQLVRIQRNKAAALLRLAARNVPVGFGESWKKPLSAEFGKPYFIKLMGFVAEERKHYTVYPPPHQVFTWTQMCDIRQVKVVILGQDPYHGPNQAHGLCFSVQRPVPPPPSLENIYKELSTDIDGFVHPGHGDLSGWAKQGVLLLNAVLTVRAHQANSHKERGWEQFTDAVVSWLNQNSSGLVFLLWGSYAQKKGSAIDRKRHHVLQTAHPSPLSVYRGFFGCRHFSKTNELLRKSGKEPINWKDL

SEQ ID NO: 326 - protein, 345 aa, Rhinopithecus bieti
  MOD_RES (306)..(306): Any amino acid
MIGQKTLYSFFSPSPARKRRAPSPEPAVLGTGVAAVPEENGDAAANPAKKAPAAQEESGTPSSSPLSAEQLDRIQRNKAAALLRLAARNVPVGFGESWKKHLSGEFGKPYFIKLMGFVAEERKHYTVYPPPHQVFTWTQMCDIRDVKVVILGQDPYHGPNQAHGLCFSVQRPVPPPPSLENIYKELSTDIEDFVHPGHGDLSGWAKQGVLLLNAVLTVRAHQANSHKERGWEQFTDAVVSWLNQNSNGLVFLLWGSYAQKKGSAIDRKRHHVLQTAHPSPLSVYRGFFGCRHFSKTNELLQKSGKXVKWEFRGLTAFRAGSPEHRFTHIFINSKPVISIVLQILN

SEQ ID NO: 327 - protein, 308 aa, Vombatus ursinus
MIGQKTLHSFFSPSAPKKRRSCTETPADPGTEAVVQSEDASVSPVRKRRPEDEPRAPSSPLSPEQLDRIQRNKAAALLRLASRNVPAGFGESWKRQLSAEFGKPYFIQLMGFVAEERKRHTVYPPPDQVFTWTQLCEIRDVKVVILGQDPYHGPNQAHGLCFSVQRPVPPPPSLENIYKELSTDIEGFAPPGHGDLSGWARQGVLLLNAVLTVRAHQANSHKERGWEQFTDAVVSWLNENLDGLVFMLWGSYAQKKGLSINRKRHHVLQTAHPSPLSVHRGFLGCRHFSKTNELLKKSGKKPIDWKAL

SEQ ID NO: 328 - protein, 227 aa, Mycobacterium riyadhense
MTARPLSELVEQGWAAALAPVTEQVAQMGQFLRTEIAAGRRYLPAGSNVLRAFTFPFDEVRVLIVGQDPYPTPGHAVGLSFSVAPDVRPLPRSLANIFDEYTADLGHPQPSCGDLSPWAQRGVLLLNRVLTVRPSNPASHRGKGWEAVTECAIRALAARSKPLVAILWGRDASTLKPMLATGNCVAIESPHPSPLSASRGFFGSRPFSRANELLAGMGGDPVDWRLP

SEQ ID NO: 329 - protein, 1343 aa, Labeo rohita
MQLSEEQLHQIEQNRRAALERLAKRNVPVPVGESWRKKIGTEFTKPYFTKLMSFVTMERKCFTVYPSPEQVFHCTTLCAIEDVKVVILGQDPYHHPGQAHGLAFSVLRPKPPPPSLENIFMELKEDIVGFRHPGHGDLTGWAKQGVLLLNSVLTVRAHQPTSHEGQGWEIFTDAVVLWLSRNLNGLVFLLWGSYAQRKGRVIDRSLEERCQRILQGMEGSLTARDRVGIQDFVLLDAYTSETAFMDNLRKRFNENLIYTYIGTLLVSVNPYKELGIYTKKQMDIYMGVNFFELPPHIFALADNVYRTMISETNNHFILISGESGAGKTEASKKVLQFYAVCCPSTRLLDNVRDRLLLSNPVLEAFGNAKTLKNDNSSRFGKYMDIQFDHQGAAVGGHILSYLLEKSRVVHQNHGERNFHIFYQLVEGGEDELLRWLGLERNCQNYRYLIQGECAKVSSINDKSDWKTVQKALTIIEFSEKDIEHLFAIIASVLHLGNVHFEASAMGYAKLNSNAEVHWLSKLLGIPSNMLQEGLTHRKIEAKAEEVLSPFTAEHAKYARDALAKAIYGRTFSWLVNKINESLANKWEPVPYFNNKIICDLVEEKHRGIISVLDEECLRPGEATDFTFLEKLEEKMSGHPHFVTHKLADQKTRKTLERGDFRLLHYAGEVTYSVVGFLDKNNDLLYRNIKEVMRQSKNSIIQHCFHTIEPDGKKRPETVATQFKSSLAGLTEILMTKEPWYVRCLKPNHCKQPDRFDDVMVRHQVKYLGLMEHLRVRRAGFAYRRRYEVFLKRRCFSLLLTCEHLTNLNAYLCRYKPLCPDTWPHWKGTPAEGVQRLIKHLGYKPDEYKMGRTKIFIRHPRTLFATEDAFEICKHELATRIQAKYKGYRVKGEYQRQREAATKIETCWRGLQARKERERRAWAVKVIKKFIKGFMNRNQPVSMDNSEYLAFVRQSYLTRLQENLPKSVLDKTTWLTPPPIMQEYSVPVIKYDRNGFRPRFRQLIFTQAAAYLVEEAKIKQRVNYSSLKGVSVSNLSDNFLILHVTCEDTKQKGDLVLQCSYLFEALTKICVVTKNHNLIKVVQGSVRFDIQPGKEGFVDFKSSSESMVYRAKNGHLMVGDFVDRGYYSLETFTYLLALKAKWPDRITLLRGNHESRQITQVYGFYDECQTKYGNANAWRYCTKVFDMLTVAALIDEQILCVHGGLSPDIKTLDQIRTIERNQEIPHKGAFCDLVWSDPEDVDTWAISPRGAGWLFGAKVTNEFVHINNLKLICRAHQLVHEGYKFMFDEKLVTVWSAPNYCYRCGNIASIMVFKDVNTREPKLFRAVPDSERVIPPRTTTPYFL

SEQ ID NO: 330 - protein, 322 aa, Schizosaccharomyces pombe
MTVLNTTDKRKADDTVNKLDGKLKQPRLDNFFKTNTSSPALKDTQVLDNKENNSVSKFNKEKWAENLTPAQRKLLQLEIDTLESSWFDALKDEFLKPYFLNLKEFLMKEWQSQRVFPPKEDIYSWSHHTPLHKTKVILLGQDPYHNIGQAHGLCFSVRPGIPCPPSLVNIYKAIKIDYPDFVIPKTGYLVPWADQGILMLNASLTVRAHQAASHSGKGWETFTSAVLQVALNRNRKGLVILAWGTPAAKRLQGLPLKAHYVLRSVHPSPLSAHRGFFECHHFKKTNEWLEEQYGPEKCINWSAVSEQKAKIKSSELESSSTE

SEQ ID NO: 331 - protein, 301 aa, Takifugu rubripes
MIGQKTINSFFSPVPKKRICKDLSETEEDAKDHIIQKKRKSPEPEPASPPAAPLSSEQLERIARNKRAALERLTSAQIPAGIGEGWRDKLSAEFGKPYFKQLTTYVAEERKRRTVYPPADQVFTWTQMCDIRDVKVVILGQDPYHGHNQAHGLCFSVKRPVPPPPSLENMYKELVSDIPGFQHPGHGDLTGWAKQGVLLLNAVLTVRAHNANSHKDKGWETFTDAVVQWLNTNLDGVVFMLWGSYAQKKGAAINRKRHHVLQTVHPSPLSAHRGFFGCAHFSKANELLKKSGKSPVDWKAL

SEQ ID NO: 332 - protein, 313 aa, Ictidomys tridecemlineatus
MIGQKTLYSFFSPSPARKRSVRSPEPADLGTGVVAVAEENGDAADHPTKKARVGQEEPDTPPSSPLSQEQLVRIQRNKAAALLRLAARNVPVGFGESWRKPLGAEFGKPYFIKLMGFVAEERKRYTVYPPPHQVFTWTQTCDIKDVKVVILGQDPYHGPNQAHGLCFSVQRPVPPPPSLENIYKELSTDIDGFVHPGHGDLSGWAKQGVLLLNAVLTVRAHQANSHKERGWEEFTDAVVSWLNQNLNGLVFLLWGSYAQKKGIAIDRKRHHVLQTAHPSPLSVYRGFFGCRHFSKANELLQKSGKKPIDWKEL

SEQ ID NO: 333 - protein, 730 aa, Oryzias latipes
MLWLRHRSCDKLVGRFLGTGSVIRNKMMKNWGVIGGIAAAVAAGVYVLWGPITVKKKRKKGMSPGLLNLGNTCFLNALLQGLAACPSFIRWLEKFSGLPSIQSCKDNQLSTTLLQLLKALSSDEPGEDVLDAGCLLDVLRLYRWHISSFEEQDAHELFHVITSSLEEERDRQPKVTHLFDVQFLESFPNQDDKALTCISRAPLHPLPGSWKFQHPFHGRLTSNMSCKRCETQSPVRYDSFESLSLSILLPQWGRPISLDQCLQHFISSETIKEVECENCTKLQQHSSINGQLLESQRTTFVKQLRLGKLPQCLCIHLQRLMWSNEGSPIKRQEHVQFSEYLSMDRYKHDSSTPRTQRVRCAPKTIKAESFDSIEKSMANGTEHHNNNKPFLNGTCSSMFLGSGVKNPFGFTHHDNSSAEYLFQLVAVLVHLGDMHSGHFVTYRRSPSSSRSSSNFSSQWLWVSDDSKKLKIAAVDPEPQSSPLSPEQLDKIARNKKAALEKLASGLTPQGFSESWRGELLSEFSKPYFKDLTKFVSDERKRGTVYPPAEQIFTWTQMCDIRDVKVVILGQDPYHGPGQAHGLCFSVKRPVSPPPSLENMYKELVSDIEGFKHPGHGDLTGWAQQGVLLLNAVLTVRAHQANSHKDKGWEVFTDAVVQWLSNNLQGLVFLLWGSYAQKKGSAINRKHHHVLQAVHPSPLSAHRGFFGCKHFSKANELLKKSGKSPIDWKAL

SEQ ID NO: 334 - protein, 295 aa, Electrophorus electricus
MIGQKSIKSFFSPTSKKRDTDEQTRSEDICNVKKFKTNTSAVLPSPSLSPELLEKIAKNKKAAQERLAARSAPEGIGKSWQRALGAEFGKTYFKSLMSFVAEERQKQTIYPPPHQVFTWTRMCEIEDVKVVVLGQDPYHGPNQAHGLCFSVQRPVPPPPSLVNMYKELEADIEGFRHPGHGDLTGWAKQGVLLLNAVLTVRAHQANSHKDKGWEILTDAVVNWLSANLEGLVFMLWGAYAQKKGAAIDRKRHHVLQAVHPSPLSAHRGFFGCKHFSKTNELLKKSGKKPIDWKAL

SEQ ID NO: 335 - protein, 360 aa, Xenopus tropicalis
MSHPICRPNMSVMFWLLPFPKLPVLSESWRQTSVVCSIRTKQRIGAGVIIPGFSRGAMIGQRTINSFFGPAAKKRAAPEALGEEGPYKGEITPVKKSRQSGENEIPPAVSPPLSPEQLERIQRNKAAALQKLAARHVPEGLGQSWKQALLAEFAKPYFVKLSNFVAEERKKYTVYPPPEEVFTWTQMVDIKDVKVVILGQDPYHGPNQAHGLCFSVKKPVPPPPSLVNMYKELETDIEGFSHPGHGDLTGWAKQGVLLLNAVLTVRAHNANSHKDCGWEQFTDSVVSWLNKNMDGLVFMLWGAYAQKKGSNIDRKRHLVLQTVHPSPLSAHRGFFGCCHFSKTNAYLQGLGKKPIDWKAL

SEQ ID NO: 336 - protein, 229 aa, Enterobacter cloacae
MTTPLTWHDVLAEEKQQPYFINTLSTVAAERQSGQTIYPPQKDVFNAFRYTELSDVKVVILGQDPYHGPGQAHGLAFSVRPGVAIPPSLLNMYKELEGTIPGFTRPNHGYLESWARQGVLLLNTVLTVRAGQAHSHASLGWETFTDKVISLINEHREGVVFLLWGSHAQKKGAIIDRQRHHVLKAPHPSPLSAHRGFFGCNHFVLANEWLEKRGETPIDWMPVLPAESE

SEQ ID NO: 337 - protein, 225 aa, Clostridium oryzae
MTVNIKNDWLELLEDQFEMDYYKDLRHFLISEYKTRTIYPDMYDIFNALNYTAYKDVKVVILGQDPYHGPNQAHGLSFSVKPGVPAPPSLINIYKELKDDLGCYIPNNGYLKKWTDEGVLLLNTALTVRAGEANSHRNKGWEIFTDAIISLLNKREKSIVFILWGSNAISKEKLITNKAHYIIKSPHPSPLSAHRGFFGSKPFSKANNFLKSIGEKPIDWQIENI

SEQ ID NO: 338 - protein, 231 aa, Lactobacillus apis
MKKFIGNDWDEVLAPVFESNEYHALHEFLKKEYQTKRIFPDMYHIFTAFKLTPFAKTKVVILGQDPYHNPGQATGMSFAVMPGVKLPPSLQNIYKELYDDVGCVPVQHGYLKKWADQGVLLLNAVLTVPYGHANGHQGKGWEQVTDAAIKALSDRGQVVFILWGKYAQNKIALIDQEKNYVIKSAHPSPFSADRGFFGSRPFSRCNEALKKFGEAPIDWQLPQQVTESDLA

SEQ ID NO: 339 - protein, 222 aa, Flavobacterium sp.
MKIEESWKKELQSEFEKPYFKELREFISREFDAENGKTCYPPESQIFSAFDHCPFDEVKVVIIGQDPYHGPGQANGLCFSVADGIPIRPSLRNIFVEIKNDLGKPIPATGNLERWANQGVLLLNATLTVRQGEAGSHQKQGWETFTDAVIQHISDDRQNVVFLLWGAFAQQKGKNIDKSKHCVLTSGHPSPMSANQGKWFGNKHFSKANEYLKSKGLPEIDW

SEQ ID NO: 340 - protein, 243 aa, Delftia lacustris
MALQDDAIAPAQADQLQSADPADWPVAPDWQPLVEDFFAGATGQQLLTFLHQRLEAGAVIFPPQPLRALELTPPDEVRVVILGQDPYHGRGQAEGLSFSVAPGVRMPPSLQNIFKEMQRDLGVPFPPFPNPGGSLVKWARNGVLLLNTCLTVEEGQAASHSGKGWELLTDAVIRHIAQGTRPVVFMLWGSHAQSKRAFIPGDRGHLVLTSNHPSPLSALRPPVPFIGNGHFGKARDFRAQHGY

SEQ ID NO: 341 - protein, 219 aa, Lactococcus garvieae
MKKTDWSGPLRERLPQEYFSDLVDFINEVYAKGNVYPPEDKIFRAIELTALSDVKVILVGQDPYPQPGKAQGLSFSYPASFVVNRPDSIVNIRKELQSEGFDKKDSDLTHWAEQGVLLLNAVLTVPEMKSNAHKGKIWEPLTDEIIKIASDDARPKVFLLWGGDARKKAKLIDSSKHLVLESAHPSPLSASRGFFGSQPFSKANAFLEKTGQKGIDWSK

SEQ ID NO: 342 - protein, 231 aa, Lactobacillus rodentium
MKNLIGNDWDEILAPVFQSENYQELHNFLKEEYQTKTIYPDMYHIFTAFKLTPFAKTKVVILGQDPYHNPGQATGMSFSVNPGIALPPSLKNIYKELYDDVGAVPVDHGYLKKWADQGVLLLNAVLTVPYGKANGHQGKGWEFVTDQAIKRLSERGNVVFILWGRFAQNKIPLIDQNKNFIIKSSHPSPFSADRGFFGSRPFSRCNDALKQFNEAPIDWQLPAKVNRTEIV

SEQ ID NO: 343 - protein, 270 aa, Homo sapiens
MPQAFLLGSIHEPAGALMEPQPCPGSLAESFLEEELRLNAELSQLQFSEPVGIIYNPVEYAWEPHRNYVTRYCQGPKEVLFLGMNPGPFGMAQTGVPFGEVSMVRDWLGIVGPVLTPPQEHPKRPVLGLECPQSEVSGARFWGFFRNLCGQPEVFFHHCFVHNLCPLLFLAPSGRNLTPAELPAKQREQLLGICDAALCRQVQLLGVRLVVGVGRLAEQRARRALAGLMPEVQVEGLLHPSPRNPQANKGWEAVAKERLNELGLLPLLLK

SEQ ID NO: 344 - protein, 278 aa, Rattus norvegicus
MAVSQTFPPGPAHEPASALMEPCARSLAEGFLEEELRLNAELSQLQFPEPVGVIYNPVDYAWEPHRNYVTRYCQGPKEVLFLGMNPGPFGMAQTGVPFGEVNVVRDWLGIGGSVLSPPQEHPKRPVLGLECPQSEVSGARFWGFFRTLCGQPQVFFRHCFVHNLCPLLFLAPSGRNLTPADLPAKHREQLLSICDAALCRQVQLLGVRLVVGVGRLAEQRARRALAGLTPEVQVEGLLHPSPRSPQANKGWETAARERLQELGLLPLLTDEGSVRPTP

SEQ ID NO: 345 - protein, 279 aa, Mus musculus
MAASQTFPLGPTHEPASALMEPLPCTRSLAEGFLEEELRLNAELSQLQFPEPVGVIYNPVDYAWEPHRNYVTRYCQGPKEVLFLGMNPGPFGMAQTGVPFGEVNVVRDWLGVGGPVLTPPQEHPKRPVLGLECPQSEVSGARFWGFFRTLCGQPQVFFRHCFVHNLCPLLFLAPSGRNLTPAELPAKQREQLLSICDAALCRQVQLLGVRLVVGVGRLAEQRARRALAGLTPEVQVEGLLHPSPRSAQANKGWEAAARERLQELGLLPLLTDEGSARPT

SEQ ID NO: 346 - protein, 281 aa, Xenopus laevis
MAAEACVPAEFSKDEKNGSILSAFCSDIPDITSSTESPADSFLKVELELNLKLSNLVFQDPVQYVYNPLVYAWAPHENYVQTYCKSKKEVLFLGMNPGPFGMAQTGVPFGEVNHVRDWLQIEGPVSKPEVEHPKRRIRGFECPQSEVSGARFWSLFKSLCGQPETFFKHCFVHNHCPLIFMNHSGKNLTPTDLPKAQRDTLLEICDEALCQAVRVLGVKLVIGVGRFSEQRARKALMAEGIDVTVKGIMHPSPRNPQANKGWEGIVRGQLLELGVLSLLTG

SEQ ID NO: 347 - protein, 272 aa, Bos taurus
MAVPQPFPSGPHLQPAGALMEPQPSPRSLAEGFLQEELRLNDELRQLQFSELVGIVYNPVEYAWEPHRSYVTRYCQGPKQVLFLGMNPGPFGMAQTGVPFGEVSVVRDWLGLGGPVRTPPQEHPKRPVLGLECPQSEVSGARFWGFFRNLCGQPEVFFRHCFVHNLCPLLLLAPSGRNITPAELPAKQREQLLGVCDAALCRQVQLLGVRLVVGVGRVAEQRARRALASLMPEVQVEGLLHPSPRSPQANKGWEAVAKERLNELGLLPLLTS

SEQ ID NO: 348 - protein, 7 aa, Simian virus 40
PKKKRRV

SEQ ID NO: 349 - protein, 16 aa, Unknown
  Description of Unknown: nucleoplasmin NLS sequence
KRPAATKKAGQAKKKK

SEQ ID NO: 350 - protein, 4 aa, Artificial Sequence
  Description of Artificial Sequence: Synthetic peptide
  See specification as filed for detailed description of substitutions and preferred embodiments
GGGS

SEQ ID NO: 351 - protein, 5 aa, Artificial Sequence
  Description of Artificial Sequence: Synthetic peptide
  See specification as filed for detailed description of substitutions and preferred embodiments
GGGGS

SEQ ID NO: 352 - protein, 4 aa, Artificial Sequence
  Description of Artificial Sequence: Synthetic peptide
  See specification as filed for detailed description of substitutions and preferred embodiments
GGGS

SEQ ID NO: 353 - protein, 5 aa, Artificial Sequence
  Description of Artificial Sequence: Synthetic peptide
  See specification as filed for detailed description of substitutions and preferred embodiments
GGGGS

SEQ ID NO: 354 - protein, 18 aa, Unknown
  Description of Unknown: bipartite NLS sequence
KRTADGSEFESPKKKRKV

SEQ ID NO: 355 - protein, 166 aa, Artificial Sequence
  Description of Artificial Sequence: Synthetic polypeptide
SEVEFSHEYWMRHALTLAKRARDEREVPVGAVLVLNNRVIGEGWNRAIGLHDPTAHAEIMALRQGGLVMQNYRLIDATLYVTFEPCVMCAGAMIHSRIGRVVFGVRNAKTGAAGSLMDVLHYPGMNHRVEITEGILADECAALLCYFFRMPRQVFNAQKKAQSSTD

SEQ ID NO: 356 - protein, 365 aa, Artificial Sequence
  Description of Artificial Sequence: Synthetic polypeptide
MSEVEFSHEYWMRHALTLAKRAWDEREVPVGAVLVHNNRVIGEGWNRPIGRHDPTAHAEIMALRQGGLVMQNYRLIDATLYVTLEPCVMCAGAMIHSRIGRVVFGARDAKTGAAGSLMDVLHHPGMNHRVEITEGILADECAALLSDFFRMRRQEIKAQKKAQSSTDSGGSSGGSSGSETPGTSESATPESSGGSSGGSSEVEFSHEYWMRHALTLAKRARDEREVPVGAVLVLNNRVIGEGWNRAIGLHDPTAHAEIMALRQGGLVMQNYRLIDATLYVTFEPCVMCAGAMIHSRIGRVVFGVRNAKTGAAGSLMDVLHYPGMNHRVEITEGILADECAALLCYFFRMPRQVFNAQKKAQSSTD

SEQ ID NO: 357 - protein, 6 aa, Artificial Sequence
  Description of Artificial Sequence: Synthetic 6xHis tag
HHHHHH

1. A C-to-G transversion base editor (CGBE) comprising a cytidine deaminase, a programmable DNA binding domain, and further comprising one or more nuclear localization sequences (NLS), and optionally one or more human or E. coli or other uracil-n-glycosylases (UNGs) or SMUG1, preferably wherein the CGBE does not comprise a uracil-N-glycosylase inhibitor (UGI).

2. The CGBE of claim 1, wherein the cytidine deaminase comprises an active cytidine deaminase domain from an engineered rat APOBEC1 (rAPOBEC1) comprising a mutation at residue R33.

3. (canceled)

4. The CGBE of claim 1, wherein the rAPOBEC1 further comprises one or more mutations at amino acid positions that correspond to residues P29, K34, E181, and/or L182 of rAPOBEC1 (SEQ ID NO:67) or to W90Y, R126E, R132E, W90Y+R126E (double mutant), R126E+R132E (double mutant), W90Y+R132E (double mutant), W90Y+R126E+R132E (triple mutant).

5. (canceled)

6. The CGBE of claim 1, wherein the mutation at amino acid position that correspond to residue R33 is a R33A substitution mutation.

7. The CGBE of claim 1, wherein the CGBE comprises N- or C-terminal fusions of one or more human or E. coli UNG or SMUG1 or other orthologues of UNG or SMUG1.

8. The CGBE of claim 7, wherein the one or more UNGs are from E. coli.

9. The CGBE of claim 1, where the UNG(s) is absent.

10. The CGBE of claim 1, wherein the rAPOBEC1 comprises a R33A mutation and one or more mutations at positions: P29F, P29T, K34A, E181Q and/or L182A of rAPOBEC1 (SEQ ID NO:67).

11. The CGBE of claim 10, further comprising one or more mutations in the rAPOBEC1 at residues corresponding to E24, V25; R118, Y120, H121, R126; W224-K229; P168-1186; L173+L180; R15, R16, R17, to K15-17 & A15-17; Deletion E181-L210; P190+P191; Deletion L210-K229 (C-terminal); and/or Deletion S2-L14 (N-terminal) of SEQ ID NO:67.

12. (canceled)

13. (canceled)

14. (canceled)

15. The CGBE of claim 1, comprising a linker between the cytosine deaminase and/or between the cytosine deaminase or single-chain dimers and the programmable DNA binding domain.

16. The CGBE of claim 1, wherein the programmable DNA binding domain is selected from the group consisting of a Clustered Regularly Interspaced Short Palindromic Repeats (CRISPR) Cas RNA-guided nuclease (RGN), an engineered C2H2 zinc-finger, a transcription activator effector-like effector (TALE), and variants thereof.

17. The CGBE of claim 1, wherein the CRISPR RGN is a ssDNA nickase or a catalytically inactive CRISPR Cas RNA-guided nuclease, optionally a Cas9 or Cas12a that has ssDNA nickase activity or is catalytically inactive.

18. A base editing system comprising:
(i) an CGBE of claim 1, wherein the programmable DNA binding domain is a CRISPR Cas RGN or a variant thereof; and
(ii) at least one guide RNA compatible with the base editor comprising a spacer sequence that directs the base editor to a target sequence, preferably wherein the target sequence comprises a cytosine at position 4-8, 5-7, or position 6 (with 1 being the most PAM-distal position).

19. An isolated nucleic acid encoding a CGBE of claim 1.

20. A vector comprising the isolated nucleic acid of claim 19.

21. An isolated host cell, preferably a mammalian host cell, comprising the nucleic acid of claim 19.

22. The isolated host cell of claim 21, wherein the isolated host cell expresses a CGBE.

23. A composition comprising:
(i) a CGBE of claim 1, wherein the programmable DNA binding domain is a CRISPR Cas RGN or a variant thereof;
(ii) at least one guide RNA compatible with the base editor comprising a spacer sequence that directs the base editor to a target sequence, preferably wherein the target sequence comprises a cytosine at position 4-8, 5-7, or position 6 (with 1 being the most PAM-distal position), and
(iii) a pharmaceutically acceptable carrier.

24. The composition of claim 23, comprising one or more ribonucleoprotein (RNP) complexes.

25. A method of generating a cytosine-to-guanine and guanine-to-cytosine alteration in a nucleic acid, the method comprising contacting the nucleic acid with the CGBE of claim 1.

26. (canceled)

27. (canceled)

28. (canceled)

29. (canceled)

30. (canceled)

31. (canceled)

32. (canceled)

33. (canceled)

34. (canceled)
